(19) United States
(12) Patent Application Publication
(10) Pub. No.: US 2006/0182716 A1
(43) Pub. Date: Aug. 17, 2006

(54) Synthetic hyperglycosylated, protease-resistant polypeptide variants, oral formulations and methods of using the same

(76) Inventors: Jin Hong, Brisbane, CA (US); Scott D. Seiwert, Pacifica, CA (US); Lawrence M. Blatt, San Francisco, CA (US)

Correspondence Address: BOZICEVIC, FIELD & FRANCIS LLP, 1900 UNIVERSITY AVENUE, SUITE 200, EAST PALO ALTO, CA, 94303, US

(21) Appl. No.: 11/330,917

(22) Filed: Jan. 11, 2006

Related U.S. Application Data
(63) Continuation of application No. 11/200,531, filed on Aug. 8, 2005, now abandoned.
(60) Provisional application No. 60/600,202, filed on Aug. 9, 2004.
(60) Provisional application No. 60/600,134, filed on Aug. 9, 2004.
(60) Provisional application No. 60/604,280, filed on Aug. 24, 2004.
(60) Provisional application No. 60/604,415, filed on Aug. 24, 2004.

(51) Int. Cl. A61K 38/21

(52) U.S. Cl. 424/85.6; 424/85.7

(57) ABSTRACT

The present invention provides synthetic Type I interferon receptor polypeptide agonists comprising consensus or hybrid Type I interferon receptor polypeptide agonists, containing one or more native or non-native glycosylation sites. The present invention further provides oral formulations of protease-resistant or protease-resistant, hyperglycosylated polypeptide variants, which polypeptide variants lack at least one protease cleavage site found in a parent polypeptide, and thus exhibit increased protease resistance compared to the parent polypeptide, which polypeptide variants further include (1) a carbohydrate moiety covalently linked to at least one non-native glycosylation site not found in the parent protein therapeutic or (2) a carbohydrate moiety covalently linked to at least one native glycosylation site found but not glycosylated in the parent protein therapeutic. The present invention further provides compositions, including oral pharmaceutical compositions, comprising the synthetic Type I interferon receptor polypeptide agonist, the hyperglycosylated polypeptide variant, the protease-resistant polypeptide variant, or the hyperglycosylated, protease-resistant polypeptide variant. The present invention further provides containers, devices, and kits comprising the synthetic Type I interferon receptor polypeptide agonist, the hyperglycosylated polypeptide variant, the protease-resistant polypeptide variant, or the hyperglycosylated, protease-resistant polypeptide variant. The present invention further provides therapeutic methods involving administering an effective amount of an oral pharmaceutical composition comprising a synthetic Type I interferon receptor polypeptide agonist, a hyperglycosylated polypeptide variant, a protease-resistant polypeptide variant, or a hyperglycosylated, protease-resistant polypeptide variant to an individual in need thereof.

### CROSS-REFERENCE

[0001] This application is a continuation of U.S. patent application No. 11/200,531, filed Aug. 8, 2005, which claims the benefit of U.S. Provisional Patent Application Nos. 60/600,202, filed Aug. 9, 2004, 60/600,134, filed Aug. 9, 2004, 60/604,280, filed Aug. 24, 2004, and 60/604,415, filed Aug. 24, 2004, which applications are incorporated herein by reference in their entirety.

### FIELD OF THE INVENTION

The present invention is in the field of glycosylated, protease-resistant and glycosylated protease-resistant protein therapeutics.

### BACKGROUND OF THE INVENTION

[0002] The use of proteins as therapeutic agents has gained in clinical importance. Nevertheless, there remain various obstacles and drawbacks to their use, including immunogenicity; destruction of the therapeutic protein by enzymes produced by the host; suboptimal pharmacokinetic properties; and the like. For example, immunogenicity of a therapeutic protein can lead to neutralization of the protein's activity by neutralizing antibodies generated over time in the subject being treated. In addition, immunogenicity of a therapeutic protein can lead to an inflammatory response. Destruction of a therapeutic protein by host enzymes may preclude the use of certain routes of administration. For example, oral administration of therapeutic proteins may be desirable in treating certain conditions; however, the therapeutic protein may be destroyed by enzymes in the gastrointestinal tract of the individual being treated. Furthermore, a therapeutic protein may have a short serum half life, due, e.g., to rapid elimination of the protein by the host reticuloendothelial system; as a consequence, the pharmacokinetic profile of the therapeutic protein may be such that repeated, frequent administration is necessary.

[0003] Many proteins with therapeutic potential include one or more glycosylation sites, e.g., amino acid sequences that are glycosylated by a eukaryotic cell. There have been various reports of attempts to increase the degree of glycosylation of therapeutic proteins in order to achieve 1) reduced immunogenicity; 2) less frequent administration of the protein; 3) increased serum half-life; and 4) reduction in adverse side effects such as inflammation.

[0004] Destruction of a therapeutic protein by host enzymes may preclude the use of certain routes of administration. For example, oral administration of therapeutic proteins may be desirable in treating certain conditions; however, the therapeutic protein may be destroyed by proteolytic enzymes in the gastrointestinal tract and/or in the serum of the individual being treated. Such proteolytic enzymes include, e.g., α-chymotrypsin, carboxypeptidase, endoproteinase Arg-C, endoproteinase Asp-N, endoproteinase Glu-C, endoproteinase Lys-C, and trypsin.

There is a need in the art for therapeutic proteins in oral dosage forms having suitable pharmacokinetic properties. The present invention addresses this need.

Literature

[0005] U.S. Pat. Nos. 6,685,933; 4,695,623 and 4,897,471; 6,703,225; 6,569,420; 6,299,877; 6,586,398; 6,531,122; 6,646,110; Egrie and Brown, Br J Cancer. 2001 April; 84 Suppl 1:3-10; U.S. Pat. No. 6,127,332; WO 00/26354; WO 02/081507; WO 01/36001; U.S. Pat. Nos. 5,041,376; 5,520,911; 6,673,580; 5,853,724; European Patent Application No. 640,619; WO 04/022747; and WO 004/0222593. Nyman et al. (1998) Eur. J Biochem. 253:485-493; Runkel et al. (1998) Pharmaceutical Research 15:641; Adolf et al. (1990) J Biol. Chem. 265:9290-9295.

### Sequence Listing

[0006] The present specification incorporates herein by reference, each in its entirety, the sequence information on the Compact Disks (CDs) labeled Copy 1 and Copy 2. The CDs are formatted on IBM-PC, with operating system compatibility with MS-Windows. The files on each of the CDs are as follows:
[0007] Copy 1—Seqlist.txt 1,155 KB created Nov. 3, 2005; and
[0008] Copy 2—Seqlist.txt 1,155 KB created Nov. 3, 2005.

### SUMMARY OF THE INVENTION

[0009] The present invention provides non-native glycosylation sites, oral formulations of protease-resistant polypeptide variants and protease-resistant or protease-resistant, hyperglycosylated polypeptide variants, which polypeptide variants comprise at least one mutated protease cleavage site in place of a native protease cleavage site found in a parent polypeptide, and thus exhibit increased protease resistance compared to the parent polypeptide, which polypeptide variants further include (1) a carbohydrate moiety covalently linked to at least one non-native glycosylation site not found in the parent protein therapeutic or (2) a carbohydrate moiety covalently linked to at least one native glycosylation site found but not glycosylated in the parent protein therapeutic. The present invention further provides compositions, including oral pharmaceutical compositions, comprising the glycosylated or protease-resistant or protease-resistant, hyperglycosylated polypeptide variants. The present invention further provides nucleic acids comprising nucleotide sequences encoding subject polypeptide agonists; and host cells comprising subject nucleic acids. The present invention further provides methods of treating viral infections, methods of treating fibrotic disorders, and methods of treating proliferative disorders, the methods generally involving administering to an individual in need thereof an effective amount of a subject polypeptide agonistThe present invention further provides containers, devices, and kits comprising the hyperglycosylated or protease-resistant or protease-resistant, hyperglycosylated polypeptide variants. The present invention further provides therapeutic methods involving administering an effective amount of an oral pharmaceutical composition comprising a hyperglycosylated or protease-resistant or protease-resistant, hyperglycosylated polypeptide variant to an individual in need thereof.

Features of the Invention

[0010] In one aspect, the invention provides oral pharmaceutical compositions comprising a known hyperglycosylated or protease-resistant or protease-resistant, hyperglycosylated variant of a parent protein therapeutic.

[0011] In another aspect, the invention provides an oral pharmaceutical composition that contains a first number of moles of the known hyperglycosylated or protease-resistant or protease-resistant, hyperglycosylated polypeptide variant in a first unit form, where a parenteral pharmaceutical composition containing a second number of moles of the parent protein therapeutic is proven to be effective in the treatment of a disease in a patient when administered to the patient by subcutaneous bolus injection in an amount where the patient receives the second number of moles of the parent protein therapeutic at a selected dosing interval, where the first number of moles is greater than the second number of moles, and where upon oral administration of the first unit form to the patient, the time required for release of the first number of moles of the hyperglycosylated or protease-resistant or protease-resistant, hyperglycosylated variant is no greater than the time period of the selected dosing interval.

[0012] In another aspect, the invention provides an oral pharmaceutical composition that contains a first dose of the known protease-resistant or protease-resistant, hyperglycosylated polypeptide variant in a first unit form, where a parenteral pharmaceutical composition containing a second dose of the parent protein therapeutic is proven to be effective in the treatment of a disease in a patient when administered to the patient by subcutaneous bolus injection of the second dose at a selected dosing interval, where the amount of the known protease-resistant or protease-resistant, hyperglycosylated polypeptide variant in moles of drug per kilogram of patient body weight in the first dose is greater than the amount of the parent protein therapeutic in moles of drug per kilogram of patient body weight in the second dose when the first and second doses are calculated for the average patient body weight in the total population of patients suffering from the disease, and where upon oral administration of the first dose to the patient, the time required for release of all of the protease-resistant or protease-resistant, hyperglycosylated variant in the first dose is no greater than the period of time between doses in the selected dosing interval. In some embodiments, the parenteral pharmaceutical composition is proven to be effective in the treatment of the disease in the patient when administered to the patient in a weight-based dose at the selected dosing interval, i.e., the second dose is a weight-based dose and the parenteral pharmaceutical composition is in a form that allows weight-based dosing.

[0013] The present invention further provides therapeutic methods involving administering an effective amount of an oral pharmaceutical composition comprising a known protease-resistant or protease-resistant, hyperglycosylated polypeptide variant to an individual in need thereof.

[0014] In another aspect, the invention provides a method of treating a disease in a patient comprising administering to the patient an oral pharmaceutical composition comprising a known, protease-resistant or protease-resistant, hyperglycosylated polypeptide variant of a parent protein therapeutic, where the oral pharmaceutical composition is administered orally to the patient in an amount whereby the patient receives a first dose of the known protease-resistant or protease-resistant, hyperglycosylated polypeptide variant at a first dosing interval, where a parenteral pharmaceutical composition comprising the parent protein therapeutic is proven to be effective in the treatment of the disease in a patient when administered to the patient by subcutaneous bolus injection in an amount whereby the patient receives a second dose of the parent protein therapeutic at a second dosing interval, where the first dose in moles of the protease-resistant or protease-resistant, hyperglycosylated polypeptide variant per kilogram of patient body weight is greater than the second dose in moles of the parent protein therapeutic per kilogram of patient body weight when the first and second doses are calculated for the same patient body weight, and where upon oral administration of the first dose to the patient, the time required for release of all of the protease-resistant or protease-resistant, hyperglycosylated variant in the first dose is no greater than the period of time between doses in the second dosing interval. In some embodiments, the parenteral pharmaceutical composition is proven to be effective in the treatment of the disease in the patient when administered to the patient in a weight-based dose at the second dosing interval, i.e., the second dose is a weight-based dose and the parenteral pharmaceutical composition is in a form that allows weight-based dosing. In some of the foregoing embodiments, the first dose is a weight-based dose and the oral pharmaceutical composition is in a form that allows weight-based dosing.

[0015] In another aspect, the invention provides a method of treating a disease in a patient comprising administering to the patient an oral pharmaceutical composition comprising a known protease-resistant or protease-resistant, hyperglycosylated polypeptide variant of a parent protein therapeutic, where the oral pharmaceutical composition is administered orally in an amount whereby the patient receives a first dose of the known protease-resistant or protease-resistant, hyperglycosylated polypeptide variant at a first dosing interval, where a parenteral pharmaceutical composition comprising the parent protein therapeutic is proven to be effective in the treatment of the disease in a patient when administered to the patient by subcutaneous bolus injection in an amount whereby the patient receives a second dose of the parent protein therapeutic at a second dosing interval, where the first dose in moles of the protease-resistant or protease-resistant, hyperglycosylated polypeptide variant per kilogram of patient body weight is greater than the second dose in moles of the parent protein therapeutic per kilogram of patient body weight when the first and second doses are calculated for the same patient body weight, and where the time period between doses in the first dosing interval is the same as or shorter than the time period between doses in the second dosing interval. In some embodiments, the parenteral pharmaceutical composition is proven to be effective in the treatment of the disease in the patient when administered to the patient in a weight-based dose at the second dosing interval, i.e., the second dose is a weight-based dose and the parenteral pharmaceutical composition is in a form that allows weight-based dosing. In some of the foregoing embodiments, the first dose is a weight-based dose and the oral pharmaceutical composition is in a form that allows weight-based dosing.

[0016] In another aspect, the invention provides a method of treating a disease in a patient comprising administering to the patient an oral pharmaceutical composition in a first unit form comprising a first number of moles of a known protease-resistant or protease-resistant, hyperglycosylated polypeptide variant of a parent protein therapeutic, where the first number of moles of the protease-resistant or protease-resistant, hyperglycosylated polypeptide variant is greater than a second number of moles of the parent protein therapeutic in a parenteral pharmaceutical composition, where the parenteral pharmaceutical composition is an immediate release formulation suitable for subcutaneous bolus injection, where the first unit form is administered orally to the patient at a first dosing interval that is the same as or shorter than a second dosing interval, and where the parent protein therapeutic is proven to be effective in the treatment of the disease in a patient when administered to the patient by subcutaneous bolus injection of the parenteral pharmaceutical composition in an amount whereby the patient receives the second number of moles of the parent protein therapeutic at the second dosing interval.

### BRIEF DESCRIPTION OF THE DRAWINGS

[0017] FIG. 1 depicts an amino acid sequence of human mature IFN-α2a.

[0018] FIG. 2 depicts an amino acid sequence of human mature IFN-α2b.

[0019] FIG. 3 depicts an amino acid sequence of human IFN-β.

[0020] FIG. 4 depicts an amino acid sequence of native human IFN-γ.

[0021] FIG. 5 depicts an amino acid sequence of G-CSF.

[0022] FIG. 6 depicts an amino acid sequence of human growth hormone.

[0023] FIG. 7 depicts an amino acid sequence of erythropoietin.

[0024] FIG. 8 depicts an amino acid sequence of GM-CSF.

[0025] FIG. 9 depicts an amino acid sequence of a consensus IFN-α.

[0026] FIG. 10 depicts an amino acid sequence of IFN-αc.

[0027] FIG. 11 depicts an amino acid sequence of IFN-α2c.

[0028] FIG. 12 depicts an amino acid sequence of IFN-αd.

[0029] FIG. 13 depicts an amino acid sequence of IFN-α5.

[0030] FIG. 14 depicts an amino acid sequence of IFN-α6.

[0031] FIG. 15 depicts an amino acid sequence of IFN-α4.

[0032] FIG. 16 depicts an amino acid sequence of IFN-α4b.

[0033] FIG. 17 depicts an amino acid sequence of IFN-αI.

[0034] FIG. 18 depicts an amino acid sequence of IFN-α J.

[0035] FIG. 19 depicts an amino acid sequence of IFN-αH.

[0036] FIG. 20 depicts an amino acid sequence of IFN-αF.

[0037] FIG. 21 depicts an amino acid sequence of IFN-α8.

[0038] FIG. 22 depicts an amino acid sequence of IFN-β1.

[0039] FIG. 23 depicts an amino acid sequence of IFN-β2a.

[0040] FIG. 24 depicts an amino acid sequence comparison of Infergen (SEQ ID NO: 1356) and Type I Interferon species (human IFN-α2b, SEQ ID NO:1357; human IFN-α14, SEQ ID NO: 1358; human IFN-β1, SEQ ID NO: 1359; human IFN-ω1, SEQ ID NO: 1360) that have been reported to be glycosylated naturally. The amino acid residues where the glycosylations occur are labeled with bold outlined boxes. The asparagines residues are the anchoring site for N-linked glycosylation and the threonine residue is the anchoring site for O-linked glycosylation. FIG. 24 also depicts a majority sequence (SEQ ID NO: 1355) based on the comparison.

[0041] FIG. 25 depicts an amino acid sequence comparison of amino acids 61-120 of Infergen (SEQ ID NO: 1362) and exemplary synthetic Type I interferon receptor polypeptide agonists. Sites 1, 2 and 3 are examples of positions where glycosylation sites are created. N-linked glycosylation sites are generated at Sites 1 and 2. Both N-linked and O-linked glycosylation sites are generated at Site 3.

[0042] FIG. 26 depicts a synthetic mammalian Infergen nucleic acid sequence with preferred human codon usage; and the translated open reading frame. The open reading frame is indicated with translated Infergen amino acid sequence (SEQ ID NO:1356). Six pairs of complementary primers from A to F are shown in alternating italics and bold text. The upper sense strands of the primer pairs are identified with odd number and lower non-sense strands are identified with even number. In the region upstream of the start codon ATG, a short sequence of GCCACC, the Kozak consensus sequence, is designed to increase eukaryotic translation efficiency. Two tandem stop codons—TAA and TGA—are used to ensure complete termination of translation.

[0043] FIG. 27 depicts a comparison of the nucleic acid sequences of mammalian Infergen and glycosylated mutants thereof. The nucleotides that differ ate shown in boxes. Codons used based on the preferred codon usage set forth in Table 8.

[0044] FIG. 28 depicts an amino acid sequence comparison of amino acids 81-140 of human IFN-β1 (SEQ ID NO: 1391) and exemplary glycosylated variants of human IFN-β1. Sites 1 and 2 are the positions where glycosylation mutants are generated. In general, only N-linked glycosylation sites are created at Site 1. Both N-linked and O-linked glycosylation sites are generated at Site 2. The naturally occurring N-linked glycosylation sites in human IFN-β1 and mutants are shown in boxes.

[0045] FIG. 29 depicts an amino acid sequence comparison of amino acids 81-140 of human IFN-β1 (SEQ ID NO: 1398) and exemplary glycosylated variants of human IFN-ω1. Sites 1 and 2 are the positions where glycosylation mutants are generated. In general, only N-linked glycosylation sites are created at Site 1. Both N-linked and O-linked glycosylation sites are generated at Site 2. The naturally occurring N-linked glycosylation sites in human IFN-ω1 and mutants are shown in boxes.

[0046] FIG. 30 depicts an amino acid sequence alignment of Infergen (SEQ ID NO: 1356), human IFN-α14 (SEQ ID NO:1358), human IFN-β1 (SEQ ID NO:1359), and exemplary fusion proteins with human IFN-α14 and human IFN-β signal peptides (SEQ ID NOs: 1388 and 1389, respectively). The majority sequence is shown above (SEQ ID NO:1387).

[0047] FIG. 31 depicts the amino acid sequence of mature, native human IFN-γ (SEQ ID NO:1404).

[0048] FIG. 32 depicts Western blot analysis of exemplary proteins synthesized by Cos-7 cells.

### DEFINITIONS

[0049] The term “polypeptide” refers to a polymer of amino acids and does not refer to a specific length of the product; thus, peptides, oligopeptides, and proteins are included within the definition of polypeptide. This term also does not refer to or exclude post-translational modifications of the polypeptide, for example, glycosylations, acetylations, phosphorylations and the like. Included within the term “polypeptide” are, for example, polypeptides containing one or more analogs of an amino acid (including, for example, unnatural amino acids, non-coded amino acids, etc.), polypeptides with substituted linkages, as well as other modifications known in the art, both naturally occurring and non-naturally occurring. The term “polypeptide” includes fusion proteins, including, but not limited to, fusion proteins with a heterologous amino acid sequence, fusions with heterologous and homologous leader sequences, with or without N-terminal methionine residues; immunologically tagged proteins; and the like.

[0050] The terms “polynucleotide” and “nucleic acid molecule” are used interchangeably herein to refer to polymeric forms of nucleotides of any length. The polynucleotides may contain deoxyribonucleotides, ribonucleotides, and/or their analogs. Nucleotides may have any three-dimensional structure, and may perform any function, known or unknown. The term “polynucleotide” includes single-, double-stranded and triple helical molecules. “Oligonucleotide” generally refers to polynucleotides of between about 5 and about 100 nucleotides of single- or double-stranded DNA. However, for the purposes of this disclosure, there is no upper limit to the length of an oligonucleotide. Oligonucleotides are also known as oligomers or oligos and may be isolated from genes, or chemically synthesized by methods known in the art. The term “polynucleotide” includes double-stranded DNA found, inter alia, in linear DNA molecules (e.g., restriction fragments), viruses, plasmids, and chromosomes.

[0051] The following are non-limiting embodiments of polynucleotides: a gene or gene fragment, exons, introns, mRNA, tRNA, rRNA, ribozymes, cDNA, recombinant polynucleotides, branched polynucleotides, plasmids, vectors, isolated DNA of any sequence, isolated RNA of any sequence, nucleic acid probes, and primers. A nucleic acid molecule may also comprise modified nucleic acid molecules, such as methylated nucleic acid molecules and nucleic acid molecule analogs. Analogs of purines and pyrimidines are known in the art. Nucleic acids may be naturally occurring, e.g DNA or RNA, or may be synthetic analogs, as known in the art. Such analogs may be preferred for use as probes because of superior stability under assay conditions. Modifications in the native structure, including alterations in the backbone, sugars or heterocyclic bases, have been shown to increase intracellular stability and binding affinity. Among useful changes in the backbone chemistry are phosphorothioates; phosphorodithioates, where both of the non-bridging oxygens are substituted with sulfur; phosphoroamidites; alkyl phosphotriesters and boranophosphates. Achiral phosphate derivatives include 3′-O′-5′-S-phosphorothioate, 3′-S-5′-O-phosphorothioate, 3′-CH₂-5′-O-phosphonate and 3′-NH-5′-O-phosphoroamidate. Peptide nucleic acids replace the entire ribose phosphodiester backbone with a peptide linkage.

[0052] A polynucleotide or polypeptide has a certain percent “sequence identity” to another polynucleotide or polypeptide, meaning that, when aligned, that percentage of bases or amino acids are the same when comparing the two sequences. Sequence similarity can be determined in a number of different manners. To determine sequence identity, sequences can be aligned using the methods and computer programs, including BLAST, available over the world wide web at ncbi.nlm.nih.gov/BLAST. See, e.g., Altschul et al. (1990), J Mol. Biol 215:403-10. Another alignment algorithm is FASTA, available in the Genetics Computing Group (GCG) package, from Madison, Wis., USA, a wholly owned subsidiary of Oxford Molecular Group, Inc. Other techniques for alignment are described in Methods in Enzymology, vol. 266: Computer Methods for Macromolecular Sequence Analysis (1996), ed. Doolittle, Academic Press, Inc., a division of Harcourt Brace & Co., San Diego, Calif., USA. Of particular interest are alignment programs that permit gaps in the sequence. The Smith-Waterman is one type of algorithm that permits gaps in sequence alignments. See Meth. Mol. Biol. 70: 173-187 (1997). Also, the GAP program using the Needleman and Wunsch alignment method can be utilized to align sequences. See J Mol. Biol. 48: 443-453 (1970)

[0053] The term “host cell” includes an individual cell or cell culture, which can be or has been a recipient of any recombinant vector(s) or synthetic or exogenous polynucleotide. Host cells include progeny of a single host cell, and the progeny may not necessarily be completely identical (in morphology or in total DNA complement) to the original parent cell due to natural, accidental, or deliberate mutation and/or change. A host cell includes cells transfected or infected in vivo or in vitro with a recombinant vector or a synthetic or exogenous polynucleotide. A host cell which comprises a recombinant vector of the invention is a “recombinant host cell.” In some embodiments, a host cell is a prokaryotic cell. In other embodiments, a host cell is a eukaryotic cell.

[0054] The terms “DNA regulatory sequences,” and “regulatory elements,” used interchangeably herein, refer to transcriptional and translational control sequences, such as promoters, enhancers, polyadenylation signals, terminators, protein degradation signals, and the like, that provide for and/or regulate expression of a coding sequence and/or production of an encoded polypeptide in a host cell.

[0055] The term “transformation” is used interchangeably herein with “genetic modification” and refers to a permanent or transient genetic change induced in a cell following introduction of new nucleic acid (i.e., DNA exogenous to the cell). Genetic change (“modification”) can be accomplished either by incorporation of the new DNA into the genome of the host cell, or by transient or stable maintenance of the new DNA as an episomal element. Where the cell is a mammalian cell, a permanent genetic change is generally achieved by introduction of the DNA into the genome of the cell.

[0056] The term “operably linked,” as used herein, refers to a juxtaposition wherein the components so described are in a relationship permitting them to function in their intended manner. For instance, a promoter is operably linked to a coding sequence if the promoter effects transcription or expression of the coding sequence.

[0057] The term “construct,” as used herein, refers to a recombinant nucleic acid, generally recombinant DNA, that has been generated for the purpose of the expression of a specific nucleotide sequence(s), or is to be used in the construction of other recombinant nucleotide sequences.

[0058] As used herein, the terms “treatment,” “treating,” and the like, refer to obtaining a desired pharmacologic and/or physiologic effect. The effect may be prophylactic in terms of completely or partially preventing a disease or symptom thereof and/or may be therapeutic in terms of a partial or complete cure for a disease and/or adverse affect attributable to the disease. “Treatment,” as used herein, covers any treatment of a disease in a mammal, particularly in a human, and includes: (a) increasing survival time; (b) decreasing the risk of death due to the disease; (c) preventing the disease from occurring in a subject which may be predisposed to the disease but has not yet been diagnosed as having it; (d) inhibiting the disease, i.e., arresting its development (e.g., reducing the rate of disease progression); and (e) relieving the disease, i.e., causing regression of the disease.

[0059] The terms “individual,” “host,” “subject,” and “patient,” used interchangeably herein, refer to a mammal, including primates, rodents, livestock, pets, horses, etc. In some embodiments, an individual is a human.

[0060] The term “therapeutically effective amount” is meant an amount of a therapeutic agent, or a rate of delivery of a therapeutic agent, effective to facilitate a desired therapeutic effect. The precise desired therapeutic effect will vary according to the condition to be treated, the formulation to be administered, and a variety of other factors that are appreciated by those of ordinary skill in the art.

[0061] As used herein, the terms “proven to be effective” in the context of a drug therapy for treatment of a disease, or any language of similar meaning, shall be understood to mean that the drug therapy so described was found to be safe and effective, alone or in combination with one or more additional pharmaceutical agent(s), for the treatment of the disease in a controlled clinical trial or set of clinical trials that achieved one or more of the primary clinical endpoints of the trial(s) with a statistical significance of p≦0.05. Typically, drug therapies proven to be effective for a drug include: (1) any treatment indication(s) for the drug specified in a license to market the drug granted by a regulatory authority; and (2) any treatment indication(s) for the drug described in a statement issued by a generally recognized body of medical experts (e.g. an NIH Consensus Statement).

[0062] The term “binds specifically,” in the context of antibody binding, refers to high avidity and/or high affinity binding of an antibody to a specific polypeptide i.e., epitope of a polypeptide, e.g., a subject synthetic Type I interferon receptor polypeptide agonist. For example, antibody binding to an epitope on a specific a subject synthetic Type I interferon receptor polypeptide agonist or fragment thereof is stronger than binding of the same antibody to any other epitope, particularly those which may be present in molecules in association with, or in the same sample, as the specific polypeptide of interest, e.g., binds more strongly to a specific subject synthetic Type I interferon receptor polypeptide agonist epitope than to any other Type I interferon receptor polypeptide agonist epitope so that by adjusting binding conditions the antibody binds almost exclusively to the specific subject synthetic Type I interferon receptor polypeptide agonist epitope and not to any other Type I interferon receptor polypeptide agonist epitope, or to any other polypeptide which does not comprise the epitope. Antibodies that bind specifically to a polypeptide may be capable of binding other polypeptides at a weak, yet detectable, level (e.g., 10% or less of the binding shown to the polypeptide of interest). Such weak binding, or background binding, is readily discernible from the specific antibody binding to a subject polypeptide, e.g. by use of appropriate controls. In general, specific antibodies bind to a given polypeptide with a binding affinity of 10−7 M or more, e.g., 10⁻⁸ M or more (e.g., 10⁻⁹ M, 10⁻¹⁰ M, 10⁻¹¹ M, etc.). In general, an antibody with a binding affinity of 10⁻⁶ M or less is not useful in that it will not bind an antigen at a detectable level using conventional methodology currently used.

[0063] A “fibrotic condition,” “fibrotic disease” and “fibrotic disorder” are used interchangeably to refer to a condition, disease or disorder that is amenable to treatment by administration of a compound having anti-fibrotic activity. Fibrotic disorders include, but are not limited to, pulmonary fibrosis, including idiopathic pulmonary fibrosis (IPF) and pulmonary fibrosis from a known etiology, liver fibrosis, and renal fibrosis. Other exemplary fibrotic conditions include musculoskeletal fibrosis, cardiac fibrosis, post-surgical adhesions, scleroderma, glaucoma, and skin lesions such as keloids.

[0064] The term “proliferative disorder” and “proliferative disease” are used interchangeably to refer to any disease or condition characterized by pathological cell growth or proliferation, particularly cancer.

[0065] The terms “cancer,” “neoplasm,” and “tumor” are used interchangeably herein to refer to cells that exhibit relatively autonomous growth, so that they exhibit an aberrant growth phenotype characterized by a significant loss of control of cell proliferation. Cancerous cells can be benign or malignant.

[0066] The term “hepatitis virus infection” refers to infection with one or more of hepatitis A, B, C, D, or E virus, with blood-borne hepatitis viral infection being of particular interest, particularly hepatitis C virus infection.

[0067] The term “sustained viral response” (SVR; also referred to as a “sustained response” or a “durable response”), as used herein, refers to the response of an individual to a treatment regimen for HCV infection, in terms of serum HCV titer. Generally, a “sustained viral response” refers to no detectable HCV RNA (e.g., less than about 500, less than about 200, or less than about 100 genome copies per milliliter serum) found in the patient's serum for a period of at least about one month, at least about two months, at least about three months, at least about four months, at least about five months, or at least about six months following cessation of treatment.

[0068] The term “treatment failure patients” (or “treatment failures”) as used herein generally refers to HCV-infected patients who failed to respond to previous therapy for HCV (referred to as “non-responders”) or who initially responded to previous therapy, but in whom the therapeutic response was not maintained (referred to as “relapsers”). The previous therapy generally can include treatment with IFN-α monotherapy or IFN-α combination therapy, where the combination therapy may include administration of IFN-α and an antiviral agent such as ribavirin.

[0069] The term “dosing event” as used herein refers to administration of an antiviral agent to a patient in need thereof, which event may encompass one or more releases of an antiviral agent from a drug dispensing device. Thus, the term “dosing event,” as used herein, includes, but is not limited to, installation of a continuous delivery device (e.g., a pump or other controlled release injectable system); and a single subcutaneous injection followed by installation of a continuous delivery system.

[0070] “Patterned” or “temporal” as used in the context of drug delivery is meant delivery of drug in a pattern, generally a substantially regular pattern, over a pre-selected period of time (e.g., other than a period associated with, for example a bolus injection). “Patterned” or “temporal” drug delivery is meant to encompass delivery of drug at an increasing, decreasing, substantially constant, or pulsatile, rate or range of rates (e.g., amount of drug per unit time, or volume of drug formulation for a unit time), and further encompasses delivery that is continuous or substantially continuous, or chronic.

[0071] The term “controlled drug delivery device” is meant to encompass any device wherein the release (e.g., rate, timing of release) of a drug or other desired substance contained therein is controlled by or determined by the device itself and not substantially influenced by the environment of use, or releasing at a rate that is reproducible within the environment of use.

[0072] By “substantially continuous” as used in, for example, the context of “substantially continuous infusion” or “substantially continuous delivery” is meant to refer to delivery of drug in a manner that is substantially uninterrupted for a pre-selected period of drug delivery, where the quantity of drug received by the patient during any 8 hour interval in the pre-selected period never falls to zero. Furthermore, “substantially continuous” drug delivery can also encompass delivery of drug at a substantially constant, pre-selected rate or range of rates (e.g., amount of drug per unit time, or volume of drug formulation for a unit time) that is substantially uninterrupted for a pre-selected period of drug delivery.

[0073] As used herein, the term “pirfenidone” refers to 5-methyl-1-phenyl-2-(1H)-pyridone. As used herein, the term “pirfenidone analog” refers to any compound of Formula I, IIA, or IIB, below. A “specific pirfenidone analog,” and all grammatical variants thereof, refers to, and is limited to, each and every pirfenidone analog shown in Table 10.

[0074] The term “anti-fibrotic” agent, drug or compound is meant to encompass agents that prevent or reduce fibrosis, including: Type II interferon receptor agonists (e.g. interferon-gamma); pirfenidone and pirfenidone analogs; anti-angiogenic agents, such as VEGF antagonists, VEGF receptor antagonists, bFGF antagonists, bFGF receptor antagonists, TGF-beta antagonists, and TGF-beta receptor antagonists; and anti-inflammatory agents, including tumor necrosis factor (TNF) antagonists, such as anti-TNF antibodies (e.g. REMICADE™ anti-TNF monoclonal antibody) and soluble TNF receptor (e.g. ENBREL™ TNF receptor-Ig immunoadhesin), and IL-I antagonists, such as IL-1Ra.

The terms “angiogenic agent,” “angiogenic compound,” and “angiogenic factor” are meant to include agents that promote neovascularization, such as VEGF, bFGF, and TGF-beta.

[0075] The terms “anti-angiogenic” or “angiostatic” agent, drug or compound, or “angiogenesis inhibitor,” are meant to include agents that prevent or reduce neovascularization, such as VEGF antagonists, VEGF receptor antagonists, bFGF antagonists, bFGF receptor antagonists, TGF-beta antagonists, and TGF-beta receptor antagonists.

[0076] As used herein, the term “nucleoside” refers to a compound composed of any pentose or modified pentose moiety attached to a specific position of a heterocycle or to the natural position of a purine (9-position) or pyrimidine (1-position) or to the equivalent position in an analog.

As used herein, the term “nucleotide” refers to a phosphate ester substituted on the 5′-position of a nucleoside.

[0077] As used herein, the term “heterocycle” refers to a monovalent saturated or unsaturated carbocyclic radical having at least one hetero atom, such as N, O, S, Se or P, within the ring, each available position of which can be optionally substituted, independently, with, e.g., hydroxyl, oxo, amino, imino, lower alkyl, bromo, chloro and/or cyano. Included within the term “heterocycle” are purines and pyrimidines.

As used herein, the term “purine” refers to nitrogenous bicyclic heterocycles.

As used herein, the term “pyrimidine” refers to nitrogenous monocyclic heterocycles.

As used herein, the term “L-nucleoside” refers to a nucleoside compound that has an L-ribose sugar moiety.

[0078] The term “antineoplastic” agent, drug or compound is meant to refer to any agent, including any chemotherapeutic agent, biological response modifier (including without limitation (i) proteinaceous, i.e. peptidic, molecules capable of elaborating or altering biological responses and (ii) non-proteinaceous, i.e. non-peptidic, molecules capable of elaborating or altering biological responses), cytotoxic agent, or cytostatic agent, that reduces proliferation of a neoplastic cell.

[0079] The term “anti-fibrotic” agent, drug or compound is meant to encompass agents that prevent or reduce fibrosis, including: Type II interferon receptor agonists (e.g. interferon-gamma); pirfenidone and pirfenidone analogs; anti-angiogenic agents, such as VEGF antagonists, VEGF receptor antagonists, bFGF antagonists, bFGF receptor antagonists, TGF-beta antagonists, and TGF-beta receptor antagonists; and anti-inflammatory agents, including tumor necrosis factor (TNF) antagonists, such as anti-TNF antibodies (e.g. REMICADE™ anti-TNF monoclonal antibody) and soluble TNF receptor (e.g. ENBREL™ TNF receptor-Ig immunoadhesin), and IL-1 antagonists, such as IL-1Ra.

[0080] The term “chemotherapeutic agent” or “chemotherapeutic” (or “chemotherapy”, in the case of treatment with a chemotherapeutic agent) is meant to encompass any non-proteinaceous (i.e., non-peptidic) chemical compound useful in the treatment of cancer. Examples of chemotherapeutic agents include alkylating agents such as thiotepa and cyclophosphamide (CYTOXAN™); alkyl sulfonates such as busulfan, improsulfan and piposulfan; aziridines such as benzodopa, carboquone, meturedopa, and uredopa; ethylenimines and methylamelamines including altretamine, triethylenemelamine, triethylenephosphoramide, triethylenethiophosphoramide and trimethylolomelamine; acetogenins (especially bullatacin and bullatacinone); a camptothecin (including synthetic analogue topotecan); bryostatin; callystatin; CC-1065 (including its adozelesin, carzelesin and bizelesin synthetic analogues); cryptophycins (particularly cryptophycin 1 and cryptophycin 8); dolastatin; duocarmycin (including the synthetic analogues, KW-2189 and CBI-TMI); eleutherobin; pancratistatin; a sarcodictyin; spongistatin; nitrogen mustards such as chlorambucil, chlomaphazine, cholophosphamide, estramustine, ifosfamide, mechlorethamine, mechlorethamine oxide hydrochloride, melphalan, novembichin, phenesterine, prednimustine, trofosfamide, uracil mustard; nitrosoureas such as carmustine, chlorozotocin, foremustine, lomustine, nimustine, ranimustine; antibiotics such as the enediyne antibiotics (e.g. calicheamicin, especially calicheamicin gamma1I and calicheamicin phiI 1, see, e.g., Agnew, Chem. Intl. Ed. Engl., 33: 183-186 (1994); dynemicin, including dynemicin A; bisphosphonates, such as clodronate; an esperamicin; as well as neocarzinostatin chromophore and related chromoprotein enediyne antibiotic chromomophores), aclacinomysins, actinomycin, authramycin, azaserine, bleomycins, cactinomycin, carabicin, carminomycin, carzinophilin, chromomycins, dactinomycin, daunorubicin, detorubicin, 6-diazo-5-oxo-L-norleucine, doxorubincin (Adramycin™) (including morpholino-doxorubicin, cyanomorpholino-doxorubicin, 2-pyrrolino-doxorubicin and deoxydoxorubicin), epirubicin, esorubicin, idarubicin, marcellomycin, mitomycins such as mitomycin C, mycophenolic acid, nogalamycin, olivomycins, peplomycin, potfiromycin, puromycin, quelamycin, rodorubicin, streptonigrin, streptozocin, tubercidin, ubenimex, zinostatin, zorubicin; anti-metabolites such as methotrexate and 5-fluorouracil (5-FU); folic acid analogues such as demopterin, methotrexate, pteropterin, trimetrexate; purine analogs such as fludarabine, 6-mercaptopurine, thiamiprine, thioguanine; pyrimidine analogues such as ancitabine, azacitidine, 6-azauridine, carmofur, cytarabine, dideoxyuridine, doxifluridine, enocitabine, floxuridine; androgens such as calusterone, dromostanolone propionate, epitiostanol, mepitiostane, testolactone; anti-adrenals such as aminoglutethimide, mitotane, trilostane; folic acid replenisher such as frolinic acid; aceglatone; aldophosphamide glycoside; aminolevulinic acid; eniluracil; amsacrine; bestrabucil; bisantrene; edatraxate; defofamine; demecolcine; diaziquone; elfomithine; elliptinium acetate; an epothilone; etoglucid; gallium nitrate; hydroxyurea; lentinan; lonidamine; maytansinoids such as maytansine and ansamitocins; mitoguazone; mitoxantrone; mopidamol; nitracrine; pentostatin; phenamet; pirarubicin; losoxantrone; podophyllinic acid; 2-ethylhydrazide; procarbazine; PSK®; razoxane; rhizoxin; sizofiran; spirogermanium; tenuazonic acid; triaziquone; 2,2′,2″-trichlorotriethylamine; trichothecenes (especially T-2 toxin, verracurin A, roridin A and anguidine); urethane; vindesine; dacarbazine; mannomustine; mitobronitol; mitolactol; pipobroman; gacytosine; arabinoside (“Ara-C”); cyclophosphamide; thiopeta; taxoids, e.g. paclitaxel (TAXOL®, Bristol Meyers Squibb Oncology, Princeton, N.J.) and docetaxel (TAXOTERE®, Rhone-Poulenc Rorer, Antony, France); chlorambucil; gemcitabine (Gemzar™); 6-thioguanine; mercaptopurine; methotrexate; platinum analogs such as cisplatin and carboplatin; vinblastine; platinum; etoposide (VP-16); ifosfamide; mitroxantrone; vancristine; vinorelbine (Navelbine™); novantrone; teniposide; edatrexate; daunomycin; aminopterin; xeoloda; ibandronate; CPT-11; topoisomerase inhibitor RFS 2000; difluromethylomithine (DMFO); retinoids such as retinoic acid; capecitabine; and pharmaceutically acceptable salts, acids or derivatives of any of the above. Also included in the definition of “chemotherapeutic agent” are anti-hormonal agents that act to regulate or inhibit hormone action on tumors such as anti-estrogens and selective estrogen receptor modulators (SERMs), including, for example, tamoxifen (including Nolvadex™), raloxifene, droloxifene, 4-hydroxytamoxifen, trioxifene, keoxifene, LY117018, onapristone, and toremifene (Fareston™); inhibitors of the enzyme aromatase, which regulates estrogen production in the adrenal glands, such as, for example, 4(5)-imidazoles, aminoglutethimide, megestrol acetate (Megace™), exemestane, formestane, fadrozole, vorozole (Rivisor™), letrozole (Femara™), and anastrozole (Arimidex™); and anti-androgens such as flutamide, nilutamide, bicalutamide, leuprolide, and goserelin; and pharmaceutically acceptable salts, acids or derivatives of any of the above.

[0081] The term “antineoplastic” agent, drug or compound is meant to refer to any agent, including any chemotherapeutic agent, biological response modifier (including without limitation (i) proteinaceous, i.e. peptidic, molecules capable of elaborating or altering biological responses and (ii) non-proteinaceous, i.e. non-peptidic, molecules capable of elaborating or altering biological responses), cytotoxic agent, or cytostatic agent, that reduces proliferation of a neoplastic cell.

[0082] The term “biological response modifier” refers to any proteinaceous (i.e., peptidic) molecule or any non-proteinaceous (i.e., non-peptidic) molecule capable of elaborating or altering a biological response relevant to the treatment of cancer. Examples of biological response modifiers include antagonists of tumor-associated antigens, such as anti-tumor antigen antibodies, antagonists of cellular receptors capable of inducing cell proliferation, agonists of cellular receptors capable of inducing apoptosis, such as Apo-2 ligands, Type I interferon receptor agonists, such as interferon-α molecules and interferon-β molecules, Type II interferon receptor agonists, such as interferon-γ molecules, Type III interferon receptor agonists, such as IL-28A, IL-28B, and IL-29, antagonists of inflammatory cytokines, including tumor necrosis factor (TNF) antagonists, such as anti-TNF antibodies (e.g. REMICADE™ anti-TNF monoclonal antibody) and soluble TNF receptor (e.g. ENBREL™ TNF receptor-Ig immunoadhesin), growth factor cytokines, such as hematopoietic cytokines, including erythropoietins, such as EPOGEN™ epoetin-alfa, granulocyte colony stimulating factors (G-CSFs), such as NEUPOGEN™ filgrastim, granulocyte-macrophage colony stimulating factors (GM-CSFs), and thrombopoietins, lymphocyte growth factor cytokines, such as interleukin-2, and antagonists of growth factor cytokines, including antagonists of angiogenic factors, e.g. vascular endothelial cell growth factor (VEGF) antagonists, such as AVASTIN™ bevacizumab (anti-VEGF monoclonal antibody).

[0083] As used herein, the term “HCV enzyme inhibitor” refers to any agent that inhibits an enzymatic activity of an enzyme encoded by HCV. The term “HCV enzyme inhibitor” includes, but is not limited to, agents that inhibit HCV NS3 protease activity; agents that inhibit HCV NS3 helicase activity; and agents that inhibit HCV NS5B RNA-dependent RNA polymerase activity.

[0084] As used herein, the terms “HCV NS3 protease inhibitor” and “NS3 protease inhibitor” refer to any agent that inhibits the protease activity of HCV NS3/NS4A complex. Unless otherwise specifically stated, the term “NS3 inhibitor” is used interchangeably with the terms “HCV NS3 protease inhibitor” and “NS3 protease inhibitor.”

As used herein, the terms “HCV NS5B inhibitor,” “NS5B inhibitor,” “HCV NS5B RNA-dependent RNA polymerase inhibitor,” “HCV RDRP inhibitor,” and “RDRP inhibitor,” refer to any agent that inhibits HCV NS5B RNA-dependent RNA polymerase activity.

[0085] Before the present invention is further described, it is to be understood that this invention is not limited to particular embodiments described, as such may, of course, vary. It is also to be understood that the terminology used herein is for the purpose of describing particular embodiments only, and is not intended to be limiting, since the scope of the present invention will be limited only by the appended claims.

[0086] Where a range of values is provided, it is understood that each intervening value, to the tenth of the unit of the lower limit unless the context clearly dictates otherwise, between the upper and lower limit of that range and any other stated or intervening value in that stated range, is encompassed within the invention. The upper and lower limits of these smaller ranges may independently be included in the smaller ranges, and are also encompassed within the invention, subject to any specifically excluded limit in the stated range. Where the stated range includes one or both of the limits, ranges excluding either or both of those included limits are also included in the invention.

[0087] Unless defined otherwise, all technical and scientific terms used herein have the same meaning as commonly understood by one of ordinary skill in the art to which this invention belongs. Although any methods and materials similar or equivalent to those described herein can also be used in the practice or testing of the present invention, the preferred methods and materials are now described. All publications mentioned herein are incorporated herein by reference to disclose and describe the methods or materials in connection with which the publications are cited.

[0088] It must be noted that as used herein and in the appended claims, the singular forms “a”, “and”, and “the” include plural referents unless the context clearly dictates otherwise. Thus, for example, reference to “a protease-resistant or protease-resistant, hyperglycosylated polypeptide variant” includes a plurality of such polypeptide variants and reference to “the oral formulation” includes reference to one or more oral formulations and equivalents thereof known to those skilled in the art, and so forth.

[0089] The publications discussed herein are provided solely for their disclosure prior to the filing date of the present application. Nothing herein is to be construed as an admission that the present invention is not entitled to antedate such publication by virtue of prior invention. Further, the dates of publication provided may be different from the actual publication dates which may need to be independently confirmed.

### DETAILED DESCRIPTION OF THE INVENTION

[0090] The present invention provides oral pharmaceutical compositions comprising a known protease-resistant or protease-resistant, hyperglycosylated polypeptide variant of a parent protein therapeutic. The known protease-resistant or protease-resistant, hyperglycosylated polypeptide variant contains (1) a carbohydrate moiety covalently linked to at least one non-native glycosylation site not found in the parent protein therapeutic or (2) a carbohydrate moiety covalently linked to at least one native glycosylation site found but not glycosylated in the parent protein therapeutic. In addition, the known protease-resistant or protease-resistant, hyperglycosylated polypeptide variant comprises at least one mutated protease cleavage site in place of a native protease cleavage site found in the parent protein therapeutic, and thus exhibits increased protease resistance compared to the parent protein therapeutic.

[0091] The present invention further provides therapeutic methods for treating a disease in a patient involving orally administering to the patient a known protease-resistant or protease-resistant, hyperglycosylated polypeptide variant in an oral dosage form and at a dosing interval that delivers more drug (on a mole basis) per dose and at least as many doses per unit of time as that received by the patient in a method proven to be effective for treating the disease by subcutaneous bolus injection of the parent polypeptide in a parenteral dosage form.

[0092] The present invention further provides synthetic Type I interferon receptor polypeptide agonists that contain one or more glycosylation sites; and compositions, including pharmaceutical compositions, comprising the agonists. The present invention further provides nucleic acids comprising nucleotide sequences encoding subject polypeptide agonists; and host cells comprising subject nucleic acids. The present invention further provides containers and kits comprising a subject polypeptide agonist.

[0093] A subject synthetic Type I interferon receptor polypeptide agonist comprises a hybrid or consensus Type I interferon receptor polypeptide agonist comprising at least one glycosylation site. The glycosylation site(s) provides a site for attachment of a carbohydrate moiety on the subject synthetic polypeptide agonist, such that when the subject synthetic polypeptide agonist is produced in a eukaryotic cell capable of glycosylation, the subject synthetic polypeptide agonist is glycosylated. The glycosylation confers one or more advantages on the subject synthetic polypeptide agonist, relative to a parent Type I interferon receptor polypeptide agonist, or compared to a naturally-occurring Type I interferon receptor polypeptide agonist. Such advantages include increased serum half-life; reduced immunogenicity; increased functional in vivo half-life; reduced degradation by gastrointestinal tract conditions; and increased rate of absorption by gut epithelial cells. An increased rate of absorption by gut epithelial cells and reduced degradation by gastrointestinal tract conditions is important for enteral (e.g., oral) formulations of a subject synthetic Type I interferon receptor polypeptide agonist.

[0094] Subject synthetic Type I interferon receptor polypeptide agonists are useful for treating various disorders, including viral infections, fibrotic disorders, and proliferative disorders. Accordingly, the present invention further provides methods of treating viral infections, methods of treating fibrotic disorders, and methods of treating proliferative disorders, the methods generally involving administering to an individual in need thereof an effective amount of a subject synthetic polypeptide agonist. In some embodiments, a subject treatment method further involves administration of at least one additional therapeutic agent to treat the viral infection, fibrotic disorder, or proliferative disorder. In some embodiments, a subject treatment method further involves administering at least one side effect management agent to reduce side effects induced by one or more of the therapeutic agents.

[0095] In another aspect, the synthetic Type I interferon receptor polypeptide agonists of the invention find utility as reagents for detection and isolation of Type I interferon receptor, such as detection of Type I interferon receptor expression in various cell types and tissues, including the determination of Type I interferon receptor density and distribution in cell populations, and cell sorting based on Type I interferon receptor expression. In yet another aspect, the subject synthetic Type I interferon receptor agonists are useful for the development of agents with Type I interferon receptor binding or activation patterns similar to those of the subject synthetic Type I interferon receptor agonists. The synthetic Type I interferon receptor agonists of the invention can be used in Type I interferon receptor signal transduction assays to screen for small molecule agonists or antagonists of Type I interferon receptor signaling.

Polypeptide Variants

[0096] The present invention relates to protease-resistant or protease-resistant, hyperglycosylated polypeptide variants. The protease-resistant or protease-resistant, hyperglycosylated polypeptide variants comprise at least one mutated protease cleavage site in place of a native protease cleavage site found in the parent protein therapeutic, and thus exhibit increased protease resistance compared to the parent protein therapeutic.

[0097] A protease cleavage site that is found in a parent protein therapeutic, and that is mutated in a protease-resistant or protease-resistant, hyperglycosylated polypeptide variant, such that the site is no longer cleaved, or exhibits greater resistance to cleavage (i.e., is a worse substrate than the native site for proteolytic processing) by the protease that cleaves the protease cleavage site in the parent protein, is referred to herein as a “mutated protease cleavage site” or a “mutant cleavage site.” A protease cleavage site that is found in a parent protein therapeutic is referred to herein as a “native protease cleavage site.”

[0098] In addition, a protease-resistant or protease-resistant, hyperglycosylated polypeptide variant includes (1) a carbohydrate moiety covalently attached to at least one non-native glycosylation site not found in a parent protein therapeutic or (2) a carbohydrate moiety covalently attached to at least one native glycosylation site found but not glycosylated in a parent protein therapeutic. A glycosylation site that is not found in a parent protein therapeutic is referred to herein as a “non-native glycosylation site.” A glycosylation site that is found in but not glycosylated in a parent protein therapeutic is referred to herein as a “native glycosylation site.” Thus, a protease-resistant or protease-resistant, hyperglycosylated polypeptide variant includes (1) a carbohydrate moiety covalently linked to the at least one non-native glycosylation site and/or (2) a carbohydrate moiety covalently linked to the at least one native glycosylation site. A protease-resistant or protease-resistant, hyperglycosylated polypeptide variant that includes (1) a carbohydrate moiety covalently linked to a non-native glycosylation site or (2) a carbohydrate moiety covalently linked to a native glycosylation site, and that comprises at least one mutated protease cleavage site in place of a native protease cleavage site found in a parent protein therapeutic, is referred to herein as a “protease-resistant or protease-resistant, hyperglycosylated polypeptide variant.”

[0099] A “known” protease-resistant or protease-resistant, hyperglycosylated polypeptide variant means any protease-resistant or protease-resistant, hyperglycosylated polypeptide variant presently in existence or hereafter created that (1) retains a desired pharmacologic activity of a parent protein therapeutic and (2) exhibits a longer serum half-life or greater area under the curve of drug concentration in serum as a function of time (AUC) compared to that exhibited by the parent protein therapeutic when administered to a patient in a similar form and at a similar dose, dosing frequency and route of administration. The present invention provides compositions, including oral pharmaceutical compositions, comprising the known protease-resistant or protease-resistant, hyperglycosylated pol,ypeptide variants.

[0100] A known hyperglycosylated, protease-resistant polypeptide variant is provided in a formulation suitable for oral delivery. The parent protein therapeutic is ordinarily administered in an immediate release formulation suitable for subcutaneous bolus injection. Typically, the oral dosage form of the known protease-resistant or protease-resistant, hyperglycosylated polypeptide variant contains a first number of moles; and the parent protein therapeutic is in a parenteral dosage form that contains a second number of moles. In general, the first number of moles is greater than the second number of moles. Nevertheless, a protease-resistant or protease-resistant, hyperglycosylated polypeptide variant in the oral dosage form is released over a period of time that is no longer than the dosing interval used in the administration of the parent protein therapeutic in a regimen proven to be effective for the treatment of a disease in a patient.

[0101] The parent protein therapeutic is typically in a parenteral dosage form administered by subcutaneous bolus injection, which provides a “depot” effect, slowly releasing the protein therapeutic into the bloodstream by diffusion of drug away from the tissues surrounding the injection site.

[0102] A subject method of the invention replaces the subcutaneous bolus injection “depot” effect with a comparable pharmacokinetic profile achieved by oral delivery of a longer-acting agent (a known hyperglycosylated, protease-resistant polypeptide variant with a greater serum half-life and/or AUC than its parent protein) free of an extended release or depot formulation. That is, the time required for release of the first number of moles of the known hyperglycosylated, protease-resistant polypeptide variant, when administered orally, is no greater than the period of time between doses of the parent protein therapeutic when administered by subcutaneous bolus injection in a method that is proven to be effective for treatment of the disease. Thus, in some embodiments, a known hyperglycosylated, protease-resistant polypeptide variant is administered at least as frequently, or in many cases more frequently, and at higher dosage (on a mole basis) than the parent protein therapeutic.

Structural Features

[0103] A protease-resistant or protease-resistant, hyperglycosylated polypeptide variant has an amino acid sequence that comprises one or more mutated protease cleavage sites in place of a native protease cleavage site(s) found in a corresponding parent protein therapeutic; and has an amino acid sequence that comprises (1) one or more non-native glycosylation sites and/or (2) one or more native glycosylation sites. Thus, e.g., a desired polypeptide variant has an amino acid sequence that comprises one or more mutated protease cleavage sites in place of a native protease cleavage site(s) found in a parent protein therapeutic; and has an amino acid sequence that comprises one or more glycosylation sites not found in the parent protein therapeutic or found but not glycosylated in the parent protein therapeutic. A parent protein therapeutic is in some embodiments a corresponding naturally-occurring polypeptide. In other embodiments, a parent protein therapeutic is a non-naturally occurring polypeptide (e.g., a synthetic polypeptide, a hybrid polypeptide, a consensus polypeptide, a fusion polypeptide, a recombinant polypeptide, or other variant of a naturally-occurring polypeptide). As used herein, the terms “polypeptide variant” and “variant polypeptide” both refer to any polypeptide that comprises one or more mutated protease cleavage sites in place of a native protease cleavage sites(s) found in a parent protein therapeutic; and that comprises (1) one or more glycosylation sites not found in the parent protein therapeutic or (2) one or more glycosylation sites found but not glycosylated in the parent protein therapeutic.

[0104] Non-native and native glycosylation sites include N-linked glycosylation sites, and O-linked glycosylation sites. N-linked glycosylation sites include, e.g., Asn-X-Ser/Thr, where the asparagine residue provides a site for N-linked glycosylation, and where X is any amino acid. O-linked glycosylation sites include at least one serine or threonine residue. A number of O-linked glycosylation sites are known in the art and have been reported in the literature. See, e.g., Ten Hagen et al. (1999) J Biol. Chem. 274(39):27867-74; Hanisch et al. (2001) Glycobiology 11:731-740; and Ten Hagen et al. (2003) Glycobiology 13:1R-16R.

[0105] In all embodiments, a polypeptide variant is hyperglycosylated, e.g., a polypeptide variant comprises (1) a carbohydrate moiety covalently linked to a non-native glycosylation site and/or (2) a carbohydrate moiety covalently linked to a native glycoyslation site. In many embodiments, a known protease-resistant or protease-resistant, hyperglycosylated polypeptide variant comprises a carbohydrate moiety covalently linked to a native glycosylation site; and a carbohydrate moiety covalently linked to a non-native glycosylation site. In some embodiments, a known protease-resistant or protease-resistant, hyperglycosylated polypeptide variant comprises O-linked glycosylation. In other embodiments, a known protease-resistant or protease-resistant, hyperglycosylated polypeptide variant comprises N-linked glycosylation. In other embodiments, a known protease-resistant or protease-resistant, hyperglycosylated polypeptide variant comprises both O-linked and N-linked glycosylation.

[0106] In some embodiments, a known protease-resistant or protease-resistant, hyperglycosylated polypeptide variant comprises one, two, three, four, or five carbohydrate moieties, each linked to different glycosylation sites. In some embodiments, a known protease-resistant or protease-resistant, hyperglycosylated polypeptide variant is glycosylated at a non-native glycosylation site. In some of these embodiments, a known protease-resistant or protease-resistant, hyperglycosylated polypeptide variant is glycosylated at a single non-native glycosylation site. In other embodiments, a known protease-resistant or protease-resistant, hyperglycosylated polypeptide variant is glycosylated at more than one non-native glycosylation site, e.g., the known protease-resistant or protease-resistant, hyperglycosylated polypeptide variant is glycosylated at two, three, or four non-native glycosylation sites.

[0107] In other embodiments, a known protease-resistant or protease-resistant, hyperglycosylated polypeptide variant is glycosylated at a native glycosylation site. In some of these embodiments, a known protease-resistant or protease-resistant, hyperglycosylated polypeptide variant is glycosylated at a single native glycosylation site. In other embodiments, a known protease-resistant or protease-resistant, hyperglycosylated polypeptide variant is glycosylated at more than one native glycosylation site, e.g., the known protease-resistant or protease-resistant, hyperglycosylated polypeptide variant is glycosylated at two, three, or four native glycosylation sites.

[0108] In other embodiments, a known protease-resistant or protease-resistant, hyperglycosylated polypeptide variant is glycosylated at both a native glycosylation site(s) and a non-native glycosylation site(s).

[0109] A known protease-resistant or protease-resistant, hyperglycosylated polypeptide variant can comprise at least one additional carbohydrate moiety not found in a parent protein therapeutic when each is synthesized in a eukaryotic cell that is capable of N- and/or O-linked protein glycosylation. Thus, e.g., compared to a parent protein therapeutic, a known protease-resistant or protease-resistant, hyperglycosylated polypeptide variant can comprise at least one, at least two, at least three, or at least four, or more, additional carbohydrate moieties. For example, where a parent protein therapeutic has one covalently linked carbohydrate moiety, a known protease-resistant or protease-resistant, hyperglycosylated polypeptide variant can have two, three, four, or more, covalently linked carbohydrate moieties. In some embodiments, the known protease-resistant or protease-resistant, hyperglycosylated polypeptide variant lacks a carbohydrate moiety covalently linked to a non-native glycosylation site; and has instead at least one, at least two, at least three, or at least four, or more, additional carbohydrate moieties attached to native glycosylation sites. In other embodiments, the known protease-resistant or protease-resistant, hyperglycosylated polypeptide variant lacks a carbohydrate moiety covalently linked to a native glycosylation site; and has instead at least two, at least three, or at least four, or more, carbohydrate moieties attached to non-native glycosylation sites.

Glycosylated Type I Interferons

[0110] A subject synthetic Type I interferon receptor polypeptide agonist can have a consensus or hybrid Type I interferon receptor polypeptide agonist amino acid sequence that comprises one or more non-native glycosylation sites. Thus, e.g., a subject synthetic Type I interferon receptor polypeptide agonist can have an amino acid sequence that comprises one or more glycosylation sites not found in a naturally-occurring Type I interferon receptor polypeptide agonist, e.g., not found in any known naturally occurring IFN-α, IFN-β, or IFN-ω. As used herein, the term “non-native glycosylation site” is defined as a glycosylation site located at a position in a synthetic Type I interferon receptor polypeptide agonist amino acid sequence, for which glycosylation site/position there is no homologous glycosylation site/position that exists in a naturally-occurring Type I interferon receptor polypeptide agonist amino acid sequence.

[0111] Alternatively, a subject synthetic Type I interferon receptor polypeptide agonist can have a consensus or hybrid Type I interferon receptor polypeptide agonist amino acid sequence that comprises one or more naturally-occurring or native glycosylation sites. As used herein, the term “native glycosylation site” is defined as a glycosylation site located at a position in a synthetic Type I interferon receptor polypeptide agonist amino acid sequence, for which glycosylation site/position there is a homologous glycosylation site/position that exists in at least one naturally-occurring Type I interferon receptor polypeptide agonist amino acid sequence.

[0112] As used herein, the term “synthetic Type I interferon receptor polypeptide agonist” is defined as any consensus or hybrid Type I interferon polypeptide agonist that comprises one or more glycosylation sites. Thus, a “synthetic Type I interferon receptor polypeptide agonist” encompasses any hybrid or consensus Type I interferon receptor polypeptide agonist that comprises one or more glycosylation sites, including any hybrid or consensus Type I interferon receptor polypeptide agonist that comprises one or more native glycosylation sites and/or one or more non-native glycosylation sites.

[0113] A “parent Type I interferon receptor polypeptide agonist” is a Type I interferon receptor polypeptide agonist that serves as a reference point for comparison. In some embodiments, a subject synthetic Type I interferon receptor polypeptide agonist comprises at least one additional glycosylation site not found in a parent Type I interferon receptor polypeptide agonist. For example, in some embodiments, a parent Type I interferon receptor polypeptide agonist is Infergen® consensus IFN-α (InterMune, Inc., Brisbane, Calif.). As shown in FIG. 25, a subject synthetic Type I interferon receptor polypeptide agonist comprises one or more glycosylation sites not found in the parent Infergen® consensus IFN-α.

[0114] A subject synthetic Type I interferon receptor polypeptide agonist has a length of from about 150 amino acids to about 200 amino acids, e.g., from about 150 amino acids to about 155 amino acids, from about 155 amino acids to about 160 amino acids, from about 160 amino acids to about 165 amino acids, from about 165 amino acids to about 170 amino acids, from about 170 amino acids to about 175 amino acids, from about 175 amino acids to about 180 amino acids, from about 180 amino acids to about 185 amino acids, from about 185 amino acids to about 190 amino acids, from about 190 amino acids to about 195 amino acids, or from about 195 amino acids to about 200 amino acids.

[0115] In some embodiments, the amino acid sequence of a naturally-occurring Type I interferon receptor polypeptide agonist is modified to include at least one non-native glycosylation site. As one non-limiting example, where a naturally occurring Type I interferon receptor polypeptide agonist comprises the amino acid sequence KDSS, the KDSS sequence is modified to KNSS. As another non-limiting example, where a naturally occurring Type I interferon receptor polypeptide agonist comprises the amino acid sequence WDET, the WDET sequence is modified to WNET. As another non-limiting example, where a naturally occurring Type I interferon receptor polypeptide agonist comprises the amino acid sequence VEET, the VEET sequence is modified to VTET. As another non-limiting example, where a naturally occurring Type I interferon receptor polypeptide agonist comprises the amino acid sequence VEET, the VEET sequence is modified to VNET.

[0116] In many embodiments, a subject synthetic Type I interferon receptor polypeptide agonist is glycosylated. In some embodiments, a subject synthetic Type I interferon receptor polypeptide agonist comprises O-linked glycosylation. In other embodiments, a subject synthetic Type I interferon receptor polypeptide agonist comprises N-linked glycosylation. In other embodiments, a subject synthetic Type I interferon receptor polypeptide agonist comprises both O-linked and N-linked glycosylation.

[0117] In some embodiments, a subject synthetic Type I interferon receptor polypeptide agonist is glycosylated at a non-native glycosylation site. In some of these embodiments, a subject synthetic Type I interferon receptor polypeptide agonist is glycosylated at a single non-native glycosylation site. In other embodiments, a subject synthetic Type I interferon receptor polypeptide agonist is glycosylated at more than one non-native glycosylation site, e.g., the subject synthetic Type I interferon receptor polypeptide agonist is glycosylated at two, three, or four non-native glycosylation sites.

[0118] In other embodiments, a subject synthetic Type I interferon receptor polypeptide agonist is glycosylated at a native glycosylation site. In some of these embodiments, a subject synthetic Type I interferon receptor polypeptide agonist is glycosylated at a single native glycosylation site. In other embodiments, a subject synthetic Type I interferon receptor polypeptide agonist is glycosylated at more than one native glycosylation site, e.g., the subject synthetic Type I interferon receptor polypeptide agonist is glycosylated at two, three, or four native glycosylation sites.

[0119] In other embodiments, a subject synthetic Type I interferon receptor polypeptide agonist is glycosylated at both a native glycosylation site(s) and a non-native glycosylation site(s).

[0120] Whether a subject synthetic Type I interferon receptor polypeptide agonist comprises N-linked and/or O-linked glycosylation is readily determined using standard techniques. See, e.g., “Techniques in Glycobiology” R. Townsend and A. Hotchkiss, eds. (1997) Marcel Dekker; and “Glycoanalysis Protocols (Methods in Molecular Biology, Vol. 76)” E. Hounsell, ed. (1998) Humana Press. The change in electrophoretic mobility of a protein before and after treatment with chemical or enzymatic deglycosylation (e.g., using endoglycosidases and/or exoglycosidases) is routinely used to determine the glycosylation status of a protein. Enzymatic deglycosylation can be carried out using any of a variety of enzymes, including, but not limited to, peptide-N4-(N-acetyl-β-D-glucosaminyl) asparagine amidase (PNGase F); endoglycosidase F1, endoglycosidase F2, endoglycosidase F3, α(2→3,6,8,9) neuraminidase, and the like. For example, sodium docecyl sulfate-polyacrylamide gel electrophoresis (SDS-PAGE) analysis of the protein, either pre-treated with PNGase F or untreated with PNGaseF, is conducted. A marked decrease in band width and change in migration position after treatment with PNGaseF is considered diagnostic of N-linked glycosylation. The carbohydrate content of a glycosylated protein can also be detected using lectin analysis of protein blots (e.g., proteins separated by SDS-PAGE and transferred to a support, such as a nylon membrane). Lectins, carbohydrate-binding proteins from various plant tissues, have both high affinity and narrow specificity for a wide range of defined sugar epitopes found on glycoprotein glycans. Cummings (1994) Methods in Enzymol. 230:66-86. Lectins can be detectably labeled (either directly or indirectly), allowing detection of binding of lectins to carbohydrates on glycosylated proteins. For example, when conjugated with biotin or digoxigenin, a lectin bound to a glycosylated protein can be easily identified on membrane blots through a reaction utilizing avidin or anti-digoxigenin antibodies conjugated with an enzyme such as alkaline phosphatase, β-galactosidase, luciferase, or horse radish peroxidase, to yield a detectable product. Screening with a panel of lectins with well-defined specificity provides considerable information about a glycoprotein's carbohydrate complement.

Consensus Type I Interferon Receptor Polypeptide Agonists with Non-native Glycosylation Site(s)

[0121] In some embodiments, a subject synthetic Type I interferon receptor polypeptide agonist comprises a consensus amino acid sequence and at least one non-native glycosylation site. In other embodiments, a subject synthetic Type I interferon receptor polypeptide agonist comprises a consensus amino acid sequence and at least one native glycosylation site.

[0122] A consensus sequence is derived by aligning three or more amino acid sequences, and identifying amino acids that are shared by at least two of the sequences. In some embodiments, a synthetic Type I interferon receptor polypeptide agonist comprises a consensus sequence derived from determining a consensus sequence of naturally occurring human IFN-α2b, naturally-occurring human IFN-α14, and naturally-occurring human IFN-β1. In other embodiments, a synthetic Type I interferon receptor polypeptide agonist comprises a consensus sequence derived from determining a consensus sequence of naturally occurring human IFN-α2b, naturally-occurring human IFN-α14, and naturally-occurring human IFN-ω1. In other embodiments, a synthetic Type I interferon receptor polypeptide agonist comprises a consensus sequence derived from determining a consensus sequence of naturally occurring human IFN-α2b, naturally-occurring human IFN-β1, and naturally-occurring human IFN-ω1. In other embodiments, a synthetic Type I interferon receptor polypeptide agonist comprises a consensus sequence derived from determining a consensus sequence of naturally occurring human IFN-α14, naturally-occurring human IFN-β1, and naturally-occurring human IFN-ω1. In other embodiments, a synthetic Type I interferon receptor polypeptide agonist comprises a consensus sequence derived from determining a consensus sequence of naturally occurring human IFN-α2b, naturally-occurring human IFN-α14, naturally-occurring human IFN-β1, and naturally-occurring human IFN-ω1. In other embodiments, the comparison further comprises including in the comparison the amino acid sequence of Infergen® consensus IFN-α.

[0123] In some of these embodiments, the subject synthetic Type I interferon receptor polypeptide agonist is a consensus sequence containing one or more glycosylation sites originating from one or more of the parent Type I interferon receptor polypeptide agonist amino acid sequences used to derive the consensus sequence. In additional embodiments, the consensus sequence is further modified to incorporate at least one non-native glycosylation site.

[0124] In one embodiment, the subject synthetic Type I interferon receptor polypeptide agonist comprises an amino acid sequence corresponding to the majority sequence depicted in FIG. 24 (SEQ ID NO: 1355), further modified to incorporate at least one non-native glycosylation site.

[0125] In another embodiment, the subject synthetic Type I interferon receptor polypeptide agonist comprises an amino acid sequence corresponding to the majority sequence depicted in FIG. 24 (SEQ ID NO: 1355), further modified to incorporate at least one glycosylation site from the group of the VTET glycosylation site of IFN-α2b, the KNSS glycosylation site of IFN-α14, the WNET glycosylation site of IFN-β1, and the WNMT glycosylation site of IFN-ω1. In other embodiments, the majority sequence is additionally modified to incorporate one or more non-native glycosylation sites.

[0126] In other embodiments, a subject synthetic Type I interferon receptor polypeptide agonist is obtained from a consensus sequence that does not have a glycosylation site originating from a parent Type I interferon receptor polypeptide agonist. In these embodiments, the consensus sequence is then further modified to include at least one non-native glycosylation site in order to obtain the subject synthetic Type I interferon receptor polypeptide agonist. For example, in some embodiments, where the consensus sequence includes KDSS, the KDSS sequence is modified to KNSS or KNST. As another non-limiting example, where the consensus sequence includes WDET, the WDET sequence is modified to WNET or WNES. As another non-limiting example, where the consensus sequence includes VEET, the VEET sequence is modified to VTET, VNES or VNET.

[0127] In particular embodiments, a subject synthetic Type I interferon receptor polypeptide agonist comprises the amino acid sequence identified as “majority” in FIG. 24, and further comprises one or more of the following modifications: KDSS modified to KNST; WDET modified to WNES; VEET modified to VNES or VNET.

[0128] In some particular embodiments, a subject synthetic Type I interferon receptor polypeptide agonist comprises an amino acid sequence as set forth in any one of SEQ ID NOs: 1363-1373, as set forth in FIG. 25.

[0129] In one embodiment, a subject synthetic Type I interferon receptor polypeptide agonist comprises an amino acid sequence corresponding to the majority sequence depicted in FIG. 28 (SEQ ID NO:1390), further modified to incorporate at least one non-native glycosylation site. In some embodiments, a subject Type I interferon receptor polypeptide agonist comprises an amino acid sequence as set forth in any one of SEQ ID NOs: 1392-1396, as set forth in FIG. 28.

[0130] In one embodiment, a subject synthetic Type I interferon receptor polypeptide agonist comprises an amino acid sequence corresponding to the majority sequence depicted in FIG. 29 (SEQ ID NO:1397), further modified to incorporate at least one non-native glycosylation site. In some embodiments, a subject Type I interferon receptor polypeptide agonist comprises an amino acid sequence as set forth in any one of SEQ ID NOs:1399-1403, as set forth in FIG. 29.

Hybrid Type I Interferon Receptor Polypeptide Agonists with Non-native Glycosylation Site(s)

[0131] In some embodiments, a subject synthetic Type I interferon receptor polypeptide agonist comprises a hybrid Type I interferon receptor polypeptide agonist with one or more glycosylation sites. In other embodiments, a subject synthetic Type I interferon receptor polypeptide agonist comprises a hybrid type I interferon receptor polypeptide agonist with one or more glycosylation sites not found in any naturally occurring Type I interferon receptor polypeptide agonist. As used herein, a “hybrid Type I interferon receptor polypeptide agonist” is a polypeptide having an amino acid sequence comprising discrete sub-sequences corresponding in amino acid identity and number to sub-sequences of different, naturally occurring Type I interferon receptor polypeptide agonists, wherein the amino acid sequence of the subject synthetic polypeptide agonist differs from that of any naturally-occurring Type I interferon receptor polypeptide agonist. In some embodiments, the discrete sub-sequences are selected from IFN-α2b, IFN-α14, IFN-β1, and IFN-ω, and the amino acid sequence of the polypeptide agonist differs from the amino acid sequence of naturally occurring Type I interferon receptor polypeptide agonists IFN-α2b, IFN-α14, IFN-β1, and IFN-ω).

[0132] In other embodiments, the discrete sub-sequences can be selected from IFN-α2b, IFN-α14, IFN-β1, Infergen® consensus IFN-α, and IFN-ω, and the amino acid sequence of the polypeptide agonist differs from each of the amino acid sequences of the Type I interferon receptor polypeptide agonists IFN-α2b, IFN-α14, IFN-β1, Infergen® consensus IFN-α, and IFN-ω, respectively.

[0133] In some of these embodiments, the subject synthetic Type I interferon receptor polypeptide agonist is a hybrid Type I interferon receptor polypeptide agonist amino acid sequence containing one or more glycosylation sites originating from one or more of the parental Type I interferon receptor polypeptide agonist amino acid sequences used to derive the hybrid sequence. In additional embodiments, the hybrid sequence is further modified to incorporate at least one additional non-native glycosylation site (in addition to any non-native glycosylation site(s) originating from a parental Type I interferon receptor polypeptide agonist amino acid sequence).

[0134] It will be appreciated that the synthetic Type I interferon receptor polypeptide agonists of the invention include hybrid Type I interferon polypeptide agonists formed by substituting one or more amino acid residues in a parental IFN-α amino acid sequence with the amino acid residue or residues that form a native glycosylation site at a homologous position in another parental IFN-α amino acid sequence.

[0135] In one non-limiting example, the subject synthetic Type I interferon receptor polypeptide agonist is a hybrid Type I interferon receptor polypeptide agonist having a hybrid sequence formed by substituting KNSS for the native KDSS residues in the sequence of interferon alfa-2a or in the sequence of interferon alfa-2b. These synthetic Type I receptor polypeptide agonists are referred to herein as IFN-α2a (D99N) and IFN-α2b (D99N), respectively, where the amino acid sequence is that shown in FIG. 24.

[0136] In another non-limiting example, the subject synthetic Type I interferon receptor polypeptide agonist is a hybrid Type I interferon receptor polypeptide agonist having a hybrid sequence formed by substituting WNET for the native WDET residues in the sequence of interferon alfa-2a or in the sequence of interferon alfa-2b. These synthetic Type I receptor polypeptide agonists are referred to herein as IFN-α2a (D105N) and IFN-α2b (D105N), respectively, where the amino acid sequence numbering is that shown in FIG. 24.

[0137] In another non-limiting example, the subject synthetic Type I interferon receptor polypeptide agonist is a hybrid Type I interferon receptor polypeptide agonist having a hybrid sequence formed by substituting KNSS and WNET for the native KDSS and WDET residues, respectively, in the sequence of interferon alfa-2a or in the sequence of interferon alfa-2b. These synthetic Type I receptor polypeptide agonists are referred to herein as IFN-α2a (D99N, D105N) and IFN-α2b (D99N, D105N), respectively, where the amino acid sequence g is that shown in FIG. 24.

[0138] In other embodiments, the subject synthetic Type I interferon receptor polypeptide agonist is obtained from a hybrid sequence that does not have any glycosylation site(s) originating from a parental Type I interferon receptor polypeptide agonist amino acid sequence. In these embodiments, the hybrid sequence is then further modified to include at least one non-native glycosylation site in order to obtain the subject synthetic Type I interferon receptor polypeptide agonist. For example, in some embodiments, where the hybrid sequence includes KDSS, the KDSS sequence is modified to KNSS. As another non-limiting example, where the hybrid sequence includes WDET, the WDET sequence is modified to WNET. As another non-limiting example, where the hybrid sequence includes VEET, the VEET sequence is modified to VTET or VNET.

[0139] In some embodiments, a subject synthetic Type I interferon receptor polypeptide agonist comprises, in order from N-terminus to C-terminus, from about 2 to about 90, e.g., from about 2 to about 5, from about 5 to about 7, from about 7 to about 10, from about 10 to about 15, from about 15 to about 20, from about 20 to about 25, from about 25 to about 30, from about 30 to about 35, from about 35 to about 40, from about 40 to about 45, from about 45 to about 50, from about 50 to about 55, from about 55 to about 60, from about 60 to about 65, from about 65 to about 70, from about 75 to about 80, from about 80 to about 85, or from about 85 to about 90 contiguous amino acids of a first Type I interferon receptor polypeptide agonist selected from naturally-occurring human IFN-α2b (SEQ ID NO:1357), naturally-occurring human IFN-α14 (SEQ ID NO:1358), naturally occurring human IFN-β1 (SEQ ID NO:1359), and naturally-occurring human IFN-ω1 (SEQ ID NO:1360); and from about 2 to about 90, e.g., from about 2 to about 5, from about 5 to about 7, from about 7 to about 10, from about 10 to about 15, from about 15 to about 20, from about 20 to about 25, from about 25 to about 30, from about 30 to about 35, from about 35 to about 40, from about 40 to about 45, from about 45 to about 50, from about 50 to about 55, from about 55 to about 60, from about 60 to about 65, from about 65 to about 70, from about 75 to about 80, from about 80 to about 85, or from about 85 to about 90 contiguous amino acids of a second Type I interferon receptor polypeptide agonist selected from naturally-occurring human IFN-α2b, human IFN-α14, human IFN-β1, and human IFN-ω1, where the first and second Type I interferon receptor polypeptide agonists are different.

[0140] In some embodiments, a subject hybrid synthetic Type I interferon receptor polypeptide agonist further comprises from about 2 to about 90, e.g., from about 2 to about 5, from about 5 to about 7, from about 7 to about 10, from about 10 to about 15, from about 15 to about 20, from about 20 to about 25, from about 25 to about 30, from about 30 to about 35, from about 35 to about 40, from about 40 to about 45, from about 45 to about 50, from about 50 to about 55, from about 55 to about 60, from about 60 to about 65, from about 65 to about 70, from about 75 to about 80, from about 80 to about 85, or from about 85 to about 90 contiguous amino acids of a third Type I interferon receptor polypeptide agonist selected from naturally-occurring human IFN-α2b, human IFN-α14, human IFN-β1, and human IFN-ω1, where the third Type I interferon receptor polypeptide agonist is different from the first and second Type I interferon receptor polypeptide agonists.

[0141] In still other embodiments, a subject hybrid synthetic Type I interferon receptor polypeptide agonist further comprises from about 2 to about 90, e.g., from about 2 to about 5, from about 5 to about 7, from about 7 to about 10, from about 10 to about 15, from about 15 to about 20, from about 20 to about 25, from about 25 to about 30, from about 30 to about 35, from about 35 to about 40, from about 40 to about 45, from about 45 to about 50, from about 50 to about 55, from about 55 to about 60, from about 60 to about 65, from about 65 to about 70, from about 75 to about 80, from about 80 to about 85, or from about 85 to about 90 contiguous amino acids of a fourth Type I interferon receptor polypeptide agonist selected from naturally-occurring human IFN-α2b, human IFN-α14, human IFN-β1, and human IFN-ω1, where the fourth Type I interferon receptor polypeptide agonist is different from the first, second, and third Type I interferon receptor polypeptide agonists.

[0142] In particular embodiments, any of the above-described embodiments of a subject hybrid synthetic Type I interferon receptor polypeptide agonist comprises from about 4 to about 90, e.g., from about 4 to about 7, from about 7 to about 10, from about 10 to about 15, from about 15 to about 20, from about 20 to about 25, from about 25 to about 30, from about 30 to about 35, from about 35 to about 40, from about 40 to about 45, from about 45 to about 50, from about 50 to about 55, from about 55 to about 60, from about 60 to about 65, from about 65 to about 70, from about 75 to about 80, from about 80 to about 85, or from about 85 to about 90 contiguous amino acids of a segment of a human IFN-α14 polypeptide that includes at least the amino acid sequence KNSS of naturally occurring human IFN-α14.

[0143] In particular embodiments, any of the above-described embodiments of a subject hybrid synthetic Type I interferon receptor polypeptide agonist comprises from about 4 to about 90, e.g., from about 4 to about 7, from about 7 to about 10, from about 10 to about 15, from about 15 to about 20, from about 20 to about 25, from about 25 to about 30, from about 30 to about 35, from about 35 to about 40, from about 40 to about 45, from about 45 to about 50, from about 50 to about 55, from about 55 to about 60, from about 60 to about 65, from about 65 to about 70, from about 75 to about 80, from about 80 to about 85, or from about 85 to about 90 contiguous amino acids of a segment of a human IFN-β1 polypeptide that includes at least the amino acid sequence WNET of naturally occurring human IFN-β1.

[0144] In particular embodiments, any of the above-described embodiments of a subject hybrid synthetic Type I interferon receptor polypeptide agonist comprises from about 4 to about 90, e.g., from about 4 to about 7, from about 7 to about 10, from about 10 to about 15, from about 15 to about 20, from about 20 to about 25, from about 25 to about 30, from about 30 to about 35, from about 35 to about 40, from about 40 to about 45, from about 45 to about 50, from about 50 to about 55, from about 55 to about 60, from about 60 to about 65, from about 65 to about 70, from about 75 to about 80, from about 80 to about 85, or from about 85 to about 90 contiguous amino acids of a segment of a human IFN-ω1 polypeptide that includes at least the amino acid sequence WNMT of naturally occurring human IFN-ω1.

[0145] In particular embodiments, any of the above-described embodiments of a subject hybrid synthetic Type I interferon receptor polypeptide agonist comprises from about 4 to about 90, e.g., from about 4 to about 7, from about 7 to about 10, from about 10 to about 15, from about 15 to about 20, from about 20 to about 25, from about 25 to about 30, from about 30 to about 35, from about 35 to about 40, from about 40 to about 45, from about 45 to about 50, from about 50 to about 55, from about 55 to about 60, from about 60 to about 65, from about 65 to about 70, from about 75 to about 80, from about 80 to about 85, or from about 85 to about 90 contiguous amino acids of a segment of a human IFN-α2b polypeptide that includes at least the amino acid sequence VTET of naturally occurring human IFN-α2b.

Functional Features

[0146] A subject synthetic polypeptide is a Type I interferon receptor polypeptide agonist, e.g., a subject synthetic Type I interferon receptor polypeptide agonist binds to and causes signal transduction via the Type I interferon receptor. Whether a subject synthetic Type I interferon receptor polypeptide agonist functions as a Type I interferon receptor agonist can be readily determined using any known assay. Such assays include, an in vitro cell-based assay to detect activation of interferon-responsive genes (e.g., using a reporter gene operably linked to a promoter containing one or more interferon responsive elements); and the like. Such assays also include KIRA assays for Type I interferon receptor activation activity as described in the “Diagnostic Uses” section below.

[0147] In some embodiments, a subject synthetic Type I interferon receptor polypeptide agonist exhibits one or more of the following activities: antiproliferative activity, anti-viral activity, and anti-fibrotic activity. Whether a subject synthetic Type I interferon receptor polypeptide agonist exhibits anti-viral activity can be readily determined using any known assay, including e.g., an in vitro cell-based inhibition of viral replication assay. See, e.g., Patick et al. (1999) Antimicrobial Agents and Chemotherapy 43:2444-2450. Whether a subject synthetic Type I interferon receptor polypeptide agonist exhibits anti-proliferative activity can be readily determined using any known assay, including, e.g., an in vitro cell-based inhibition of proliferation assay.

[0148] A subject synthetic Type I interferon receptor polypeptide agonist exhibits one or more of the following properties: increased serum half-life; reduced immunogenicity in vivo; increased functional in vivo half-life; increased stability; reduced degradation by gastrointestinal tract conditions; and improved water solubility.

[0149] In some embodiments, a subject synthetic Type I interferon receptor polypeptide agonist has an increased serum half-life compared to a naturally occurring Type I interferon receptor polypeptide agonist or compared to a parent Type I interferon receptor polypeptide agonist. The term “serum half-life” is used interchangeably herein with the terms “plasma half-life,” and “circulating half-life.” In some embodiments, a subject synthetic Type I interferon receptor polypeptide agonist has a serum half life that is at least about 10%, at least about 15%, at least about 20%, at least about 25%, at least about 30%, at least about 35%, at least about 40%, at least about 45%, at least about 50%, at least about 55%, at least about 60%, at least about 65%, at least about 70%, at least about 75%, at least about 80%, at least about 90%, at least about 100% (or two-fold), at least about 2.5-fold, at least about 3-fold, at least about 3.5-fold, at least about 4-fold, at least about 4.5-fold, or at least about 5-fold greater than the serum half life of a naturally-occurring Type I interferon receptor polypeptide agonist or parent Type I interferon receptor polypeptide agonist that lacks the non-native glycosylation site. In some embodiments, a subject synthetic Type I interferon receptor polypeptide agonist has a serum half life that is at least about 10%, at least about 15%, at least about 20%, at least about 25%, at least about 30%, at least about 35%, at least about 40%, at least about 45%, at least about 50%, at least about 55%, at least about 60%, at least about 65%, at least about 70%, at least about 75%, at least about 80%, at least about 90%, at least about 100% (or two-fold), at least about 2.5-fold, at least about 3-fold, at least about 3.5-fold, at least about 4-fold, at least about 4.5-fold, or at least about 5-fold greater than the serum half life of a naturally-occurring Type I interferon receptor polypeptide agonist, or a Type I interferon receptor polypeptide agonist that has the same amino acid sequence as a naturally-occurring Type I interferon receptor agonist.

[0150] The serum half-life of a subject synthetic Type I interferon receptor polypeptide agonist is readily determined using well known methods. For example, a subject synthetic Type I interferon receptor polypeptide agonist is detectably labeled, and is administered to an individual (e.g., an experimental non-human animal, or a human subject), and, at various time points following administration of the agonist, a blood sample is drawn and the amount of detectably labeled synthetic Type I interferon receptor polypeptide agonist in the blood sample is determined.

[0151] In some embodiments, a subject synthetic Type I interferon receptor polypeptide agonist exhibits increased resistance to degradation by gastrointestinal tract conditions compared to a naturally occurring Type I interferon receptor polypeptide agonist or compared to a parent Type I interferon receptor polypeptide agonist. In some embodiments, a subject synthetic Type I interferon receptor polypeptide agonist exhibits at least about 10%, at least about 15%, at least about 20%, at least about 25%, at least about 30%, at least about 35%, at least about 40%, at least about 45%, at least about 50%, at least about 55%, at least about 60%, at least about 65%, at least about 70%, at least about 75%, at least about 80%, or at least about 90%, or greater, reduction of degradation in the gastrointestinal tract, compared to the level of degradation of a naturally-occurring Type I interferon receptor polypeptide agonist or parent Type I interferon receptor polypeptide agonist that lacks the non-native glycosylation site(s).

[0152] Whether a subject synthetic Type I interferon receptor polypeptide agonist exhibits increased resistance to degradation by gastrointestinal tract conditions can be readily determined using well-known methods. For example, a subject synthetic Type I interferon receptor polypeptide agonist is contacted in vitro with digestive enzymes found in the gastrointestinal tract, and the effect of the enzymes on the structural and functional integrity of the subject synthetic Type I interferon receptor polypeptide agonist determined. An in vivo method for determining resistance to degradation by gastrointestinal tract conditions can be used.

[0153] A known protease-resistant or protease-resistant, hyperglycosylated polypeptide variant suitable for use herein is a protease-resistant or protease-resistant, hyperglycosylated variant of a parent protein therapeutic, wherein the parent protein therapeutic is any protein therapeutic that is effective in the treatment of the disease or condition in a patient when administered to the patient. A list of exemplary protein therapeutics is provided below. A known protease-resistant or protease-resistant, hyperglycosylated polypeptide variant is effective in the treatment of the same disease or condition in a patient as the corresponding parent protein therapeutic.

Protease Resistant or Protease Resistant, Hyperglycosylated Polypeptide Variants

[0154] A known protease-resistant or protease-resistant, hyperglycosylated polypeptide variant is a protease-resistant or protease-resistant, hyperglycosylated variant of a protein therapeutic, and is in many embodiments provided in a first unit form. The first unit form can comprise a first number of moles of the known protease-resistant or protease-resistant, hyperglycosylated polypeptide variant in an oral pharmaceutical composition. The parent protein therapeutic in many embodiments can be in an immediate release formulation suitable for subcutaneous bolus injection, i.e. a second unit form, where the first number of moles in the first unit form is greater than a second number of moles of the protein therapeutic in the second unit form. For example, the first number of moles can be at least about 5%, at least about 10%, at least about 15%, at least about 20%, at least about 25%, at least about 30%, at least about 35%, at least about 40%, at least about 45%, or at least about 50%, or at least about 75%, or at least about 100%, or at least about three-fold, or at least about four-fold, or at least about five-fold, or at least about six-fold, or at least about seven-fold, or at least about eight-fold, or at least about nine-fold, or at least about ten-fold, or more, greater than the second number of moles.

[0155] In many embodiments, upon oral administration of the first unit form to a patient, the time required for release of the first number of moles of the known protease-resistant or protease-resistant, hyperglycosylated polypeptide variant is no longer than the period of time that elapses between doses of the parent protein therapeutic when administered in the second unit form by subcutaneous bolus injection at a selected dosing frequency in a therapeutic regimen that is proven to be effective for treating the disease or condition of the patient. Thus, e.g., the time required for release of the first number of moles of the known protease-resistant or protease-resistant, hyperglycosylated polypeptide variant upon oral administration of the first unit form can be at least about 5%, at least about 10%, at least about 15%, at least about 20%, at least about 25%, at least about 30%, at least about 35%, at least about 40%, at least about 45%, or at least about 50%, or more, less than the time interval between doses of the parent therapeutic in the second unit form when administered by subcutaneous bolus injection at the selected dosing frequency. In some embodiments, the first unit form is in an immediate release formulation suitable for oral delivery.

[0156] A known protease-resistant or protease-resistant, hyperglycosylated polypeptide variant can be administered by mouth more frequently than the corresponding parent polypeptide is administered by subcutaneous bolus injection. For example, a known protease-resistant or protease-resistant, hyperglycosylated polypeptide variant can be administered by mouth at least twice as frequently, at least 2⅓ times more frequently, at least 2.5 times more frequently, at least three times more frequently, at least 3.5 times more frequently, or at least four times more frequently, or at least five times more frequently, or at least six times more frequently, or more frequently, than the corresponding parent polypeptide is administered by subcutaneous bolus injection. Thus, e.g., where a parent polypeptide therapeutic is administered once weekly, the corresponding protease-resistant or protease-resistant, hyperglycosylated polypeptide variant can be administered twice weekly, three times weekly, once daily, twice daily, three times daily, or more than three times daily.

[0157] As one non-limiting example, the parent protein therapeutic is IFN-γ1b, and the IFN-γ1b is administered in a unit dosage form suitable for subcutaneous injection at a dosage of 1×10⁶ International Units (IU)/m² (or 50 μg/m² or 3.0×10⁻⁹ mol./m²) subcutaneously three times per week, for a total weekly dose of 150 μg/m² (or 3×10⁶ IU/m² or 9.0×10⁻⁹ mol./m²). A desired hyperglycosylated, protease-resistant variant of IFN-γ1b is in a unit dosage form suitable for oral delivery; the known hyperglycosylated, protease-resistant IFN-γ1b variant is administered orally, and more frequently than 3 times per week (e.g., 4 times per week, 5 times per week, 6 times per week, once daily, twice daily, or three times daily); and the total weekly dose of hyperglycosylated, protease-resistant IFN-γ1b variant that is administered is greater than or equal to 9.0×10⁻⁹ mol./m², e.g., the total weekly dose is from about 9.0×10⁻⁹ mol./m² to about 1.0×10⁻⁸ mol./m², from about 1.0×10⁻⁸ mol./m² to about 2.5×10⁻⁸ mol./m², from about 2.5×10⁻⁸ mol./m² to about 5.0×10⁻⁸ mol./m², or from about 5.0×10⁻⁸ mol./m² to about 7.5×10⁻⁸ mol./m², or from about 7.5×10⁻⁸ mol./m² to about 1.0×10⁻⁷ mol./m², or from about 1.0×10⁻⁷ mol./m² to about 1.0×10⁻⁶ mol./m².

[0158] In another aspect, the total weekly dose of hyperglycosylated, protease-resistant IFN-γ1b variant that is administered is greater than or equal to 500 μg, e.g., from about 500 μg to about 750 μg, from about 750 μg to about 1,000 μg, from about 1,000 μg to about 1,500 μg, or from about 1,500 μg to about 2,000 μg.

[0159] A known protease-resistant or protease-resistant, hyperglycosylated polypeptide variant exhibits increased protease resistance compared to the corresponding parent polypeptide. In some embodiments, a known protease-resistant or protease-resistant, hyperglycosylated polypeptide variant exhibits resistance to serum proteases that is at least about 10%, at least about 15%, at least about 20%, at least about 25%, at least about 30%, at least about 35%, at least about 40%, at least about 45%, at least about 50%, at least about 55%, at least about 60%, at least about 65%, at least about 70%, at least about 7 5%, at least about 80%, at least about 90%, at least about 100% (or two-fold), at least about 2.5-fold, at least about 3-fold, at least about 3.5-fold, at least about 4-fold, at least about 4.5-fold, at least about 5-fold (at least about 5 times), at least about 6-fold, at least about 7-fold, at least about 8-fold, at least about 9-fold, at least about 10-fold, at least about 20-fold, at least about 30-fold, at least about 40-fold, at least about 50-fold, at least about 60-fold, at least about 70-fold, at least about 80-fold, at least about 90-fold, at least about 100-fold, at least about 200-fold, at least about 300-fold, at least about 400-fold, at least about 500-fold, at least about 600-fold, at least about 700-fold, at least about 800-fold, at least about 900-fold, or at least about 1000-fold, or more, greater than the resistance to serum proteases of the corresponding parent protein therapeutic, in human blood, human serum, or an in vitro mixture containing one or more proteases.

[0160] In some embodiments, a known protease-resistant or protease-resistant, hyperglycosylated polypeptide variant exhibits at least about 10%, at least about 15%, at least about 20%, at least about 25%, at least about 30%, at least about 35%, at least about 40%, at least about 45%, at least about 50%, at least about 55%, at least about 60%, at least about 65%, at least about 70%, at least about 75%, at least about 80%, at least about 90%, at least about 100% (or two-fold), at least about 2.5-fold, at least about 3-fold, at least about 3.5-fold, at least about 4-fold, at least about 4.5-fold, at least about 5-fold (at least about 5 times), at least about 6-fold, at least about 7-fold, at least about 8-fold, at least about 9-fold, at least about 10-fold, at least about 20-fold, at least about 30-fold, at least about 40-fold, at least about 50-fold, at least about 60-fold, at least about 70-fold, at least about 80-fold, at least about 90-fold, at least about 100-fold, at least about 200-fold, at least about 300-fold, at least about 400-fold, at least about 500-fold, at least about 600-fold, at least about 700-fold, at least about 800-fold, at least about 900-fold, or at least about 1000-fold, or more, greater resistance to one or more of α-chymotrypsin, endoproteinase Arg-C, endoproteinase Asp-N, endoproteinase Glu-C, endoproteinase Lys-C, and trypsin, compared to the corresponding parent protein therapeutic.

[0161] In some embodiments, the extent of the increase in protease resistance of the polypeptide variant is determined by comparing the half-life of the polypeptide variant to the half-life of the corresponding parent protein therapeutic in human blood or human serum in vitro, or in an in vitro composition comprising one or more serum proteases. For example, the resistance to protease cleavage can be determined by detecting the level of a biological activity of a protease-resistant polypeptide variant following separately contacting the polypeptide variant and the corresponding parent protein therapeutic with a mixture of proteases, with human serum, or with human blood; and comparing the activity of the polypeptide variant to that of the corresponding parent protein therapeutic. If the biological activity of the polypeptide variant is higher than that of the corresponding parent protein therapeutic following incubation with human blood, human serum, or one or more proteases, then the polypeptide variant has increased protease resistance compared to the parent protein therapeutic.

[0162] The following is one non-limiting example of an in vitro assay for determining protease resistance. In separate containers, a polypeptide variant and the corresponding parent protein therapeutic are added to a mixture of proteases containing 1.5 pg each of α-chymotrypsin, carboxypeptidase, endoproteinase Arg-C, endoproteinase Asp-N, endoproteinase Glu-C, endoproteinase Lys-C, and trypsin, forming a reaction mixture; and the reaction mixture kept at 25° C. for 30 minutes. At the end of the 30-minute reaction period, an agent that inhibits the activity of the proteases is added; and a biological activity of the polypeptide variant and the corresponding parent protein therapeutic is detected. The following is another non-limiting example of an in vitro assay for determining protease resistance. In separate containers, a polypeptide variant and the corresponding parent protein therapeutic are added to either a lysate of human blood, or human serum, forming a reaction mixture; and the reaction mixture is kept at 37° C. for a suitable period of time (e.g., 5 minutes, 10 minutes, 15 minutes, 30 minutes, or 60 minutes, etc.). An agent that inhibits the activity of the proteases is then added; and a biological activity of the polypeptide variant and the corresponding parent protein therapeutic is detected.

[0163] The corresponding parent protein therapeutic can be any parent protein therapeutic that is proven to be effective in the treatment of the disease or condition in a patient when administered to the patient in an immediate release formulation by subcutaneous bolus injection of the second unit form at a suitable dosing frequency. In these embodiments, the known protease-resistant or protease-resistant, hyperglycosylated polypeptide variant is effective in the treatment of the same disease or condition in the patient when administered to the patient orally in the first unit form at a dosing frequency that is no less often than that of the parent protein therapeutic regimen.

[0164] In many embodiments, a known hyperglycosylated, protease-resistant polypeptide variant exhibits a desired pharmacologic activity in a mammalian host, e.g., a hyperglycosylated, protease-resistant polypeptide variant can exhibit at least about 50%, at least about 60%, at least about 70%, at least about 80%, at least about 90%, or at least about 95%, of a desired pharmacologic activity of a corresponding parent protein therapeutic. As non-limiting examples, a hyperglycosylated, protease-resistant polypeptide variant can exhibit one or more of the following activities: antiproliferative activity, anti-viral activity, anti-fibrotic activity; hematopoietic activity; angiogenic activity; enzymatic activity; growth factor activity; chemokine activity; receptor agonist activity; receptor antagonist activity; and anti-angiogenic activity; where the activity is one that is desired of a corresponding parent protein therapeutic.

[0165] A known hyperglycosylated, protease-resistant polypeptide variant exhibits increased serum half-life or increased AUC compared to a parent protein therapeutic administered under similar conditions.

[0166] In some embodiments, a known hyperglycosylated, protease-resistant polypeptide variant has an increased serum half-life compared to the corresponding parent polypeptide. The term “serum half-life” is used interchangeably herein with the terms “plasma half-life,” and “circulating half-life.” In some embodiments, a hyperglycosylated, protease-resistant polypeptide variant has a serum half life that is at least about 10%, at least about 15%, at least about 20%, at least about 25%, at least about 30%, at least about 35%, at least about 40%, at least about 45%, at least about 50%, at least about 55%, at least about 60%, at least about 65%, at least about 70%, at least about 75%, at least about 80%, at least about 90%, at least about 100% (or two-fold), at least about 2.5-fold, at least about 3-fold, at least about 3.5-fold, at least about 4-fold, at least about 4.5-fold, at least about 5-fold (at least about 5 times), at least about 6-fold, at least about 7-fold, at least about 8-fold, at least about 9-fold, at least about 10-fold, at least about 20-fold, at least about 30-fold, at least about 40-fold, at least about 50-fold, at least about 60-fold, at least about 70-fold, at least about 80-fold, at least about 90-fold, at least about 100-fold, at least about 200-fold, at least about 300-fold, at least about 400-fold, at least about 500-fold, at least about 600-fold, at least about 700-fold, at least about 800-fold, at least about 900-fold, or at least about 1000-fold, or more, greater than the serum half life of the corresponding parent protein therapeutic. In some embodiments, the extent of the increase in half-life of the known hyperglycosylated, protease-resistant polypeptide variant is determined by comparing the half-life of the known hyperglycosylated, protease-resistant polypeptide variant to the half-life of the corresponding parent protein therapeutic in human blood or human serum in vivo.

[0167] In some embodiments, the extent of the increase in half-life of the known hyperglycosylated, protease-resistant polypeptide variant is determined by comparing the half-life of the known hyperglycosylated, protease-resistant polypeptide variant to the half-life of the corresponding parent protein therapeutic in human blood or human serum in vitro, or in an in vitro composition comprising one or more serum proteases. For example, the resistance to protease cleavage can be determined by detecting the level of a biological activity of a known hyperglycosylated, protease-resistant polypeptide variant following separately contacting the polypeptide variant and the corresponding parent protein therapeutic with a mixture of proteases, with human serum, or with human blood; and comparing the activity of the polypeptide variant to that of the corresponding parent protein therapeutic. If the biological activity of the polypeptide variant is higher than that of the corresponding parent protein therapeutic following incubation with human blood, human serum, or one or more proteases, then the polypeptide variant has an increased half-life compared to the parent protein therapeutic.

[0168] In some embodiments, a known hyperglycosylated, protease-resistant polypeptide variant has an AUC that is at least about 10%, at least about 15%, at least about 20%, at least about 25%, at least about 30%, at least about 35%, at least about 40%, at least about 45%, at least about 50%, at least about 55%, at least about 60%, at least about 65%, at least about 70%, at least about 75%, at least about 80%, at least about 90%, at least about 100% (or two-fold), at least about 2.5-fold, at least about 3-fold, at least about 3.5-fold, at least about 4-fold, at least about 4.5-fold, or at least about 5-fold greater than the AUC of the corresponding parent protein therapeutic when administered under similar conditions.

[0169] The serum half-life or AUC of a known hyperglycosylated, protease-resistant polypeptide variant can be readily determined using well known methods. For example, a known hyperglycosylated, protease-resistant polypeptide variant is detectably labeled, and is administered to an individual (e.g., an experimental non-human animal, or a human subject), and, at various time points following administration of the hyperglycosylated, protease-resistant polypeptide variant, a blood sample is drawn and the amount of detectably labeled hyperglycosylated, protease-resistant polypeptide variant in the blood sample is determined.

3D-scanning Methods

[0170] A glycosylated or protease-resistant or protease-resistant, hyperglycosylated polypeptide variant of a parent protein therapeutic can be generated using a 3D-scanning (structural homology) method. Structural homology refers to homology between the topology and three-dimensional structure of two proteins. Numerous methods are well known in the art for identifying structurally related amino acid positions with 3-dimensionally structurally homologous proteins. Exemplary methods include, but are not limited to: CATH (Class, Architecture, Topology and Homologous superfamily) which is a hierarchical classification of protein domain structures based on four different levels (Orengo et al., Structure, 5(8): 1093-1108, 1997); CE (Combinatorial Extension of the optimal path), which is a method that calculates pairwise structure alignments (Shindyalov et al., Protein Engineering, 11 (9):739-747, 1998); FSSP (Fold classification based on Structure-Structure alignment of Proteins), which is a database based on the complete comparison of all 3-dimensional protein structures that currently reside in the Protein Data Bank (PDB) (Holm et al., Science, 273:595-602, 1996); SCOP (Structural Classification of Proteins), which provides a descriptive database based on the structural and evolutionary relationships between all proteins whose structure is known (Murzin et al., J. Mol. Biol., 247:536-540, 1995); and VAST (Vector Alignment Search Tool), which compares newly determined 3-dimensional protein structure coordinates to those found in the MMDB/PDB database (Gibrat et al., Current Opinion in Structural Biology, 6:377-385, 1995).

[0171] As one non-limiting example, IFN-α2b mutants with increased resistance to proteolysis are generated by a 2-dimensional rational scanning method; and the corresponding residues on members of cytokine families that possess structural homology to IFN-α2b are identified and the identified residues on the other cytokines are similarly modified to produce cytokines with increased resistance to proteolysis. See, e.g., WO 04/022593.

Protein Therapeutics

[0172] A known protease-resistant or protease-resistant, hyperglycosylated polypeptide variant is a variant of a polypeptide that has a therapeutic function in a mammalian host (“a parent protein therapeutic”) in the treatment of a disease or condition in the mammalian host. A known protease-resistant or protease-resistant, hyperglycosylated polypeptide variant treats the same disease or condition in the host as a parent protein therapeutic.

[0173] It should be noted that, in the context of amino acid replacements for generating protease-resistant variants of a parent protein therapeutic, the numbering of amino acids used to describe amino acid replacements that alter a protease cleavage site coincides with the numbering of amino acids as set forth in FIGS. 1-23. In the context of amino acid replacements for generating hyperglycosylation variants of the parent protein therapeutic, the numbering of amino acids used to describe amino acid replacements that generate a glycosylation site coincides with the numbering of amino acids as set forth in FIGS. 24-30. The corresponding amino acid positions of an IFN-αdepicted in, e.g., FIG. 1 and FIG. 24 are readily identified. For example, it will be readily apparent to those skilled in the art that D99 of IFN-α2b depicted in FIG. 24 corresponds to D71 of IFN-α2b depicted in FIG. 2, and corresponds to D71 of IFN-α2a depicted in FIG. 1. Thus, e.g., D99 and D105 of the IFN-α2b amino acid sequence depicted in FIG. 24 correspond to D71 and D77, respectively of the IFN-α2a amino acid sequence depicted in FIG. 1 and of the IFN-α2b amino acid sequence depicted in FIG. 2; R50 of the IFN-α2b amino acid sequence depicted in FIG. 24 corresponds to R23 of the IFN-α2b amino acid sequence depicted in FIG. 2; D99, D105, and E134 of the Infergen amino acid sequence depicted in FIG. 24 correspond to D72, D78, and E107, respectively, of the consensus IFN-αamino acid sequence set forth in FIG. 9; the S99, E134, and F136 amino acid positions of the IFN-β1 amino acid sequence set forth in FIG. 24 correspond to S74, E109, and F111, respectively, in the IFN-β amino acid sequence set forth in FIG. 3; and the E38, S40, and S99 amino acid positions of the IFN-γ amino acid sequence set forth in FIG. 31 correspond to E41, S43, and S102, respectively, of the IFN-γ amino acid sequence set forth in FIG. 4.

[0174] Suitable protease-resistant or protease-resistant, hyperglycosylated polypeptide variants include protease-resistant or protease-resistant, hyperglycosylated forms of any parent protein therapeutic that a mammalian host is in need of, including, but not limited to: an interferon (e.g., IFN-γ, IFN-α, IFN-β, IFN-ω; IFN-τ; as described in more detail below); an insulin (e.g., Novolin, Humulin, Humalog, Lantus, Ultralente, etc.); an erythropoietin (e.g., Procrit®, Eprex®, or Epogen® (epoetin-α); Aranesp® (darbepoietin-α); NeoRecormon®, Epogin® (epoetin-β); and the like); an antibody (e.g., a monoclonal antibody) (e.g., Rituxan® (rituximab); Remicade® (infliximab); Herceptin® (trastuzumab); Humira™ (adalimumab); Xolair® (omalizumab); Bexxar® (tositumomab); Raptiva™ (efalizumab); Erbitux™ (cetuximab); and the like), including an antigen-binding fragment of a monoclonal antibody; a blood factor (e.g., Activase® (alteplase) tissue plasminogen activator; NovoSeven(® (recombinant human factor VIIa); Factor VIIa; Factor VIII (e.g., Kogenate®); Factor IX; β-globin; hemoglobin; and the like); a colony stimulating factor (e.g., Neupogen® (filgrastim; G-CSF); Neulasta (pegfilgrastim); granulocyte colony stimulating factor (G-CSF), granulocyte-monocyte colony stimulating factor, macrophage colony stimulating factor, megakaryocyte colony stimulating factor; and the like); a growth hormone (e.g., a somatotropin, e.g., Genotropin®, Nutropin®, Norditropin®, Saizen®, Serostim®, Humatrope®, etc.; a human growth hormone; and the like); an interleukin (e.g., IL-1; IL-2, including, e.g., Proleukin®; IL-3, IL-4, IL-5, IL-6, IL-7, IL-8, IL-9; etc.); a growth factor (e.g., Regranex® (beclapermin; PDGF); Fiblast® (trafermin; bFGF); Stemgen® (ancestim; stem cell factor); keratinocyte growth factor; an acidic fibroblast growth factor, a stem cell factor, a basic fibroblast growth factor, a hepatocyte growth factor; and the like); a soluble receptor (e.g., a TNF-α-binding soluble receptor such as Enbrel® (etanercept); a soluble VEGF receptor; a soluble interleukin receptor; a soluble γ/δ T cell receptor; and the like); an enzyme (e.g., α-glucosidase; Cerazyme® (imiglucarase; β-glucocerebrosidase, Ceredase® (alglucerase;); an enzyme activator (e.g., tissue plasminogen activator); a chemokine (e.g., IP-10; Mig; Groα/IL-8, RANTES; MIP-1α; MIP-1β; MCP-1; PF-4; and the like); an angiogenic agent (e.g., vascular endothelial growth factor (VEGF); an anti-angiogenic agent (e.g., a soluble VEGF receptor); a protein vaccine; a neuroactive peptide such as bradykinin, cholecystokinin, gastin, secretin, oxytocin, gonadotropin-releasing hormone, beta-endorphin, enkephalin, substance P, somatostatin, prolactin, galanin, growth hormone-releasing hormone, bombesin, warfarin, dynorphin, neurotensin, motilin, thyrotropin, neuropeptide Y, luteinizing hormone, calcitonin, insulin, glucagon, vasopressin, angiotensin II, thyrotropin-releasing hormone, vasoactive intestinal peptide, a sleep peptide, etc.; other proteins such as a thrombolytic agent, an atrial natriuretic peptide, bone morphogenic protein, thrombopoietin, relaxin, glial fibrillary acidic protein, follicle stimulating hormone, a human alpha-1 antitrypsin, a leukemia inhibitory factor, a transforming growth factor, a tissue factor, an insulin-like growth factor, a luteinizing hormone, a follicle stimulating hormone, a macrophage activating factor, tumor necrosis factor, a neutrophil chemotactic factor, a nerve growth factor, a tissue inhibitor of metalloproteinases; a vasoactive intestinal peptide, angiogenin, angiotropin, fibrin; hirudin; a leukemia inhibitory factor; an IL-1 receptor antagonist (e.g., Kineret® (anakinra)); and the like. Also suitable for use are fusion proteins comprising all or a portion of any of the foregoing proteins.

[0175] As mentioned above, a known protease-resistant or protease-resistant, hyperglycosylated protein variant exhibits at least one desired pharmacologic activity of the corresponding parent protein. Examples of useful assays for particular therapeutic proteins include, but are not limited to, GMCSF (Eaves, A. C. and Eaves C. J., Erythropoiesis in culture. In: McCullock E A (edt) Cell culture techniques—Clinics in hematology. W B Saunders, Eastbourne, pp 371-91 (1984); Metcalf, D., International Journal of Cell Cloning 10: 116-25 (1992); Testa, N. G., et al., Assays for hematopoietic growth factors. In: Balkwill F R (edt) Cytokines A practical Approach, pp 229-44; IRL Press Oxford 1991) EPO (bioassay: Kitamura et al., J. Cell. Physiol. 140 p 323 (1989)); Hirudin (platelet aggregation assay: Blood Coagul Fibrinolysis 7(2):259-61 (1996)); IFNα (anti-viral assay: Rubinstein et al., J. Virol. 37(2):755-8 (1981); anti-proliferative assay: Gao Y, et al Mol Cell Biol. 19(11):7305-13 (1999); and bioassay: Czarniecki et al., J. Virol. 49 p 490 (1984)); GCSF (bioassay: Shirafuji et al., Exp. Hematol. 17 p 116 (1989); proliferation of murine NFS-60 cells (Weinstein et al, Proc Natl Acad Sci 83:5010-4 (1986)); insulin (³H-glucose uptake assay: Steppan et al., Nature 409(6818):307-12 (2001)); hGH (Ba/F3-hGHR proliferation assay: J Clin Endocrinol Metab 85(11):4274-9 (2000); International standard for growth hormone: Horm Res, 51 Suppl 1:7-12 (1999)); factor X (factor X activity assay: Van Wijk et al. Thromb Res 22:681-686 (1981)); factor VII (coagulation assay using prothrombin clotting time: Belaaouaj et al., J. Biol. Chem. 275:27123-8(2000); Diaz-Collier et al., Thromb Haemost 71:339-46 (1994)).

Interferons

[0176] In some embodiments, the parent protein therapeutic is an interferon, and a known protease-resistant or protease-resistant, hyperglycosylated polypeptide variant comprises (1) a carbohydrate moiety covalently attached to at least one non-native glycosylation site not found in the parent interferon or (2) a carbohydrate moiety covalently attached to at least one native glycosylation site found but not glycosylated in the parent interferon; and comprises one or more mutated protease cleavage sites in place of a native protease cleavage site found in the parent protein therapeutic.

[0177] In some embodiments, the parent polypeptide is a Type I interferon receptor polypeptide agonist. Type I interferon receptor polypeptide agonists include IFN-α, IFN-β, IFN-τ, and IFN-ω. Thus, e.g., a protease-resistant or protease-resistant, hyperglycosylated polypeptide variant can be a protease-resistant or protease-resistant, hyperglycosylated Type I interferon receptor polypeptide agonist variant, including hyperglycosylated IFN-α, IFN-β, IFN-τ, and IFN-ω variants that lack at least one protease cleavage site found in the parent protein.

[0178] In other embodiments, the known protease-resistant or protease-resistant, hyperglycosylated polypeptide variant is any protease-resistant or protease-resistant, glycosylated synthetic Type I interferon receptor polypeptide agonist described in the U.S. Provisional Patent Application for “Synthetic Type I Interferon Receptor Polypeptide Agonists” (U.S. Ser. No. 60/600,202) filed on Aug. 9, 2004, the entire disclosure of which application is incorporated herein by reference.

[0179] In other embodiments, the parent polypeptide is a Type II interferon receptor polypeptide agonist. Type II interferon receptor polypeptide agonists include interferon-gamma (IFN-γ). Thus, e.g., a protease-resistant or protease-resistant, hyperglycosylated polypeptide variant can be a protease-resistant or protease-resistant, hyperglycosylated Type II interferon receptor polypeptide agonist variant, including hyperglycosylated IFN-γ that lacks at least one protease cleavage site found in the parent protein.

IFN-α

[0180] The amino acid sequence of any known IFN-α can be modified to generate a subject synthetic Type I interferon receptor polypeptide agonist. The term “interferon-alpha” as used herein refers to a family of related polypeptides that inhibit viral replication and cellular proliferation and modulate immune response.

[0181] Suitable alpha interferons include, but are not limited to, naturally-occurring IFN-α (including, but not limited to, naturally occurring IFN-α2a, IFN-α2b, and IFN-α14); an IFN-α as described in U.S. Pat. No. 6,704,225; recombinant interferon alpha-2b such as Intron-A interferon available from Schering Corporation, Kenilworth, N.J.; recombinant interferon alpha-2a such as Roferon interferon available from Hoffmann-La Roche, Nutley, N.J.; recombinant interferon alpha-2C such as Berofor alpha 2 interferon available from Boehringer Ingelheim Pharmaceutical, Inc., Ridgefield, Conn.; interferon alpha-n1, a purified blend of natural alpha interferons such as Sumiferon available from Sumitomo, Japan or as Wellferon interferon alpha-n1 (INS) available from the Glaxo-Wellcome Ltd., London, Great Britain; and interferon alpha-n3 a mixture of natural alpha interferons made by Interferon Sciences and available from the Purdue Frederick Co., Norwalk, Conn., under the Alferon Tradename; and IFN-α14.

[0182] Suitable known protease-resistant or protease-resistant, hyperglycosylated polypeptide variants include protease-resistant or protease-resistant, hyperglycosylated forms of any parent alpha interferon polypeptide. In one aspect, a known protease-resistant or protease-resistant, hyperglycosylated variant of a parent alpha interferon polypeptide has an amino acid sequence that differs from the amino acid sequence of the parent polypeptide to the extent that the variant comprises one or more glycosylation sites not found in the parent polypeptide; and further comprises at least one mutated protease cleavage site in place of a native protease cleavage site found in the parent protein.

[0183] In another aspect, the parent polypeptide is IFN-α2a and the known protease-resistant or protease-resistant, hyperglycosylated polypeptide variant is an [D99N]IFN-α2a glycopeptide, where the [D99N]IFN-α2a glycopeptide is a variant of IFN-α2a having (a) an asparagine residue in place of the native aspartic acid residue at amino acid position 99 in the amino acid sequence of IFN-α2a and (b) a carbohydrate moiety covalently attached to the R-group of said asparagine residue. It will be appreciated that the amino acid sequence of IFN-α2a is the same as the amino acid sequence of IFN-α2b depicted in FIG. 1, provided that the IFN-α2a sequence has a lysine residue in place of the arginine residue at amino acid position 50 in the IFN-α2b sequence shown in FIG. 1.

[0184] In another aspect, the parent polypeptide is IFN-α2a and the known protease-resistant or protease-resistant, hyperglycosylated polypeptide variant is an [D99N, D105N]IFN-α2a glycopeptide, where the [D99N, D105N]IFN-α2a glycopeptide is a variant of IFN-α2a having (a) an asparagine residue in place of the native aspartic acid residue at each of amino acid positions 99 and 105 in the amino acid sequence of IFN-α2a and (b) a carbohydrate moiety covalently attached to the R-group of each of said asparagine residues. It will be appreciated that the amino acid sequence of IFN-α2a is the same as the amino acid sequence of IFN-α2b depicted in FIG. 1, provided that the IFN-α2a sequence has a lysine residue in place of the arginine residue at amino acid position 50 in the IFN-α2b sequence shown in FIG. 1.

[0185] In another aspect, the parent polypeptide is IFN-α2b and the known protease-resistant or protease-resistant, hyperglycosylated polypeptide variant is an [D99N]IFN-α2b glycopeptide, where the [D99N]IFN-α2b glycopeptide is a variant of IFN-α2b having (a) an asparagine residue in place of the native aspartic acid residue at amino acid position 99 in the amino acid sequence of IFN-α2b depicted in FIG. 1 and (b) a carbohydrate moiety covalently attached to the R-group of said asparagine residue.

[0186] In another aspect, the parent polypeptide is IFN-α2b and the known protease-resistant or protease-resistant, hyperglycosylated polypeptide variant is an [D99N, D105N]IFN-α2b glycopeptide, where the [D99N, D105N]IFN-α2b glycopeptide is a variant of IFN-α2b having (a) an asparagine residue in place of the native aspartic acid residue at each of amino acid positions 99 and 105 in the amino acid sequence of IFN-α2b depicted in FIG. 1 and (b) a carbohydrate moiety covalently attached to the R-group of each of said asparagine residues.

[0187] Suitable alpha interferons further include consensus IFN-α. Consensus IFN-α (also referred to as “CIFN” and “IFN-con” and “consensus interferon”) encompasses but is not limited to the amino acid sequences designated IFN-con₁, IFN-con₂ and IFN-con₃ which are disclosed in U.S. Pat. Nos. 4,695,623 and 4,897,471; and consensus interferon as defined by determination of a consensus sequence of naturally occurring interferon alphas (e.g., Infergen®, InterMune, Inc., Brisbane, Calif.). IFN-con₁ is the consensus interferon agent in the Infergen® alfacon-1 product. The Infergen® consensus interferon product is referred to herein by its brand name (Infergen®) or by its generic name (interferon alfacon-1).

[0188] Suitable known protease-resistant or protease-resistant, hyperglycosylated polypeptide variants include hyperglycosylated forms of any parent consensus IFN-α polypeptide; where the variant lacks at least one protease cleavage site found in the parent protein. In one aspect, a known protease-resistant or protease-resistant, hyperglycosylated variant of a parent consensus IFN-α polypeptide has an amino acid sequence that differs from the amino acid sequence of the parent polypeptide to the extent that the variant comprises one or more glycosylation sites not found in a parent polypeptide; and where the variant comprises at least one mutated protease cleavage site in place of a native protease cleavage site found in the parent protein.

[0189] In another aspect, the parent polypeptide is the interferon alfacon-1 polypeptide and the known protease-resistant or protease-resistant, hyperglycosylated polypeptide variant is an [D99N]interferon alfacon-1 glycopeptide, where the [D99N]interferon alfacon-1 glycopeptide is a variant of the interferon alfacon-1 polypeptide having (a) an asparagine residue substituted for the native aspartic acid residue at amino acid position 99 in the amino acid sequence of Infergen (interferon alfacon-1) depicted in FIG. 1 and (b) a carbohydrate moiety covalently attached to the R-group of said asparagine residue.

[0190] In another aspect, the parent polypeptide is the interferon alfacon-1 polypeptide and the known protease-resistant or protease-resistant, hyperglycosylated polypeptide variant is an [D99N, D105N]interferon alfacon-1 glycopeptide, where the [D99N, D105N] interferon alfacon-1 glycopeptide is a variant of the interferon alfacon-1 polypeptide having (a) an asparagine residue substituted for each of the native aspartic acid residues at amino acid positions 99 and 105 in the amino acid sequence of Infergen depicted in FIG. 24 and (b) a carbohydrate moiety covalently attached to the R-group of each of said asparagine residues.

[0191] In another aspect, the parent polypeptide is the interferon alfacon-1 polypeptide and the known protease-resistant or protease-resistant, hyperglycosylated polypeptide variant is an [D99N, D105N, E134N]interferon alfacon-1 glycopeptide, where the [D99N, D105N, E134N]interferon alfacon-1 glycopeptide is a variant of the interferon alfacon-1 polypeptide having (a) an asparagine residue substituted for each of the native aspartic acid, aspartic acid, and glutamic acid residues at amino acid positions 99, 105 and 134, respectively, in the amino acid sequence of Infergen depicted in FIG. 24 and (b) a carbohydrate moiety covalently attached to the R-group of each of said asparagine residues.

[0192] In another aspect, the parent polypeptide is the interferon alfacon-1 polypeptide and the known protease-resistant or protease-resistant, hyperglycosylated polypeptide variant is an [D99N, E134N]interferon alfacon-1 glycopeptide, where the [D99N, E134N] interferon alfacon-1 glycopeptide is a variant of the interferon alfacon-1 polypeptide having (a) an asparagine residue substituted for each of the native aspartic acid and glutamic acid residues at amino acid positions 99 and 134, respectively, in the amino acid sequence of Infergen depicted in FIG. 24 and (b) a carbohydrate moiety covalently attached to the R-group of each of said asparagine residues.

[0193] In another aspect, the parent polypeptide is the interferon alfacon-1 polypeptide and the known protease-resistant or protease-resistant, hyperglycosylated polypeptide variant is an [D105N, E134N]interferon alfacon-1 glycopeptide, where the [D105N, E134N] interferon alfacon-1 glycopeptide is a variant of the interferon alfacon-1 polypeptide having (a) an asparagine residue substituted for each of the native aspartic acid and glutamic acid residues at amino acid positions 105 and 134, respectively, in the amino acid sequence of Infergen depicted in FIG. 24 and (b) a carbohydrate moiety covalently attached to the R-group of each of said asparagine residues.

[0194] In another aspect, the parent polypeptide is the interferon alfacon-1 polypeptide and the known protease-resistant or protease-resistant, hyperglycosylated polypeptide variant is an [D99N, D105N, E134T]interferon alfacon-1 glycopeptide, where the [D99N, D105N, E134T]interferon alfacon-1 glycopeptide is a variant of the interferon alfacon-1 polypeptide having (a) an asparagine residue substituted for each of the native aspartic acid residues at amino acid positions 99 and 105 in the amino acid sequence of Infergen depicted in FIG. 24 (b) a threonine residue substituted for the native glutamic acid residue at amino acid position 134 in the amino acid sequence of Infergen depicted in FIG. 1 and (c) a carbohydrate moiety covalently attached to the R-group of each of said asparagine and threonine residues.

[0195] In another aspect, the parent polypeptide is the interferon alfacon-1 polypeptide and the known protease-resistant or protease-resistant, hyperglycosylated polypeptide variant is an [D99N, E134T]interferon alfacon-1 glycopeptide, where the [D99N, E134T]interferon alfacon-1 glycopeptide is a variant of the interferon alfacon-1 polypeptide having (a) an asparagine residue substituted for the native aspartic acid residue at amino acid position 99 in the amino acid sequence of Infergen depicted in FIG. 24 (b) a threonine residue substituted for the native glutamic acid residue at amino acid position 134 in the amino acid sequence of Infergen depicted in FIG. 24 and (c) a carbohydrate moiety covalently attached to the R-group of each of said asparagine and threonine residues.

[0196] In another aspect, the parent polypeptide is the interferon alfacon-1 polypeptide and the known protease-resistant or protease-resistant, hyperglycosylated polypeptide variant is an [D105N, E134T]interferon alfacon-1 glycopeptide, where the [D105N, E134T]interferon alfacon-1 glycopeptide is a variant of the interferon alfacon-1 polypeptide having (a) an asparagine residue substituted for the native aspartic acid residue at amino acid position 105 in the amino acid sequence of Infergen depicted in FIG. 24 (b) a threonine residue substituted for the native glutamic acid residue at amino acid position 134 in the amino acid sequence of Infergen depicted in FIG. 24 and (c) a carbohydrate moiety covalently attached to the R-group of each of said asparagine and threonine residues.

[0197] The numbering of amino acids, discussed in the context of amino acid replacements for generating hyperglycosylation variants of the parent protein therapeutic, coincides with the numbering of amino acids used to depict the Type I interferon amino acid sequences appearing in FIG. 24. In the context of amino acid replacements, for generating protease-resistant variants of the parent protein therapeutic, the numbering of amino acids used to describe IFN-α variants coincides with the numbering of amino acids as depicted in FIG. 24.

[0198] In another aspect, a known protease-resistant or protease-resistant, hyperglycosylated polypeptide variant of a parent interferon-alpha therapeutic differs from the parent interferon-alpha therapeutic to the extent that the known protease-resistant or protease-resistant, hyperglycosylated polypeptide variant comprises (1) a carbohydrate moiety covalently attached to a non-native glycosylation site not found in the parent interferon-alpha therapeutic and/or (2) a carbohydrate moiety covalently attached to a native glycosylation site found but not glycosylated in the parent interferon-alpha therapeutic; and comprises at least one mutated protease cleavage site in place of a native protease cleavage site found in the parent IFN-α protein therapeutic.

IFN-β

[0199] The amino acid sequence of any known IFN-β can be modified to generate a subject synthetic Type I interferon receptor polypeptide agonist. The term interferon-beta (“IFN-β”) includes IFN-β polypeptides that are naturally occurring; and non-naturally-occurring IFN-β polypeptides. Suitable beta interferons include, but are not limited to, naturally-occurring IFN-β; IFN-β1a, e.g., Avonex® (Biogen, Inc.), and Rebif® (Serono, SA); IFN-β1b (Betaseron®; Berlex); and the like. Amino acid sequences of IFN-β are publicly available; for example, human IFN-β1 amino acid sequence is found under GenBank Accession No. NP_{—}002167 and is depicted in FIG. 24 (SEQ ID NO:1359). A human IFN-β amino acid sequence is also depicted in FIG. 3.

[0200] Suitable known protease-resistant or protease-resistant, hyperglycosylated polypeptide variants include hyperglycosylated forms of any parent IFN-β polypeptide. In one aspect, a known protease-resistant or protease-resistant, hyperglycosylated variant of a parent IFN-β polypeptide has an amino acid sequence that differs from the amino acid sequence of the parent polypeptide to the extent that the variant comprises one or more glycosylation sites not found in the parent polypeptide; and comprises at least one mutated protease cleavage site in place of a native protease cleavage site found in the parent IFN-β polypeptide.

[0201] The numbering of amino acids, discussed in the context of amino acid replacements for generating hyperglycosylation variants of the parent protein therapeutic, coincides with the numbering of amino acids used to depict the Type I interferon amino acid sequences appearing in FIG. 24. In the context of amino acid replacements, for generating protease-resistant variants of the parent protein therapeutic, the numbering of amino acids used to describe IFN-β variants coincides with the numbering of amino acids as depicted in FIG. 24.

[0202] In another aspect, a known protease-resistant or protease-resistant, hyperglycosylated polypeptide variant of a parent interferon-beta therapeutic differs from the parent interferon-beta therapeutic to the extent that the protease-resistant or protease-resistant, hyperglycosylated polypeptide variant comprises (1) a carbohydrate moiety covalently attached to a non-native glycosylation site not found in the parent interferon-beta therapeutic and/or (2) a carbohydrate moiety covalently attached to a native glycosylation site found but not glycosylated in the parent interferon-beta therapeutic; and comprises at least one mutated protease cleavage site in place of a native protease cleavage site found in the parent IFN-β polypeptide.

IFN-tau

[0203] The amino acid sequence of any known IFN-tau can be modified to generate a subject synthetic Type I interferon receptor polypeptide agonist. The term interferon-tau includes IFN-tau polypeptides that are naturally occurring; and non-naturally-occurring IFN-tau polypeptides Suitable tau interferons include, but are not limited to, naturally-occurring IFN-tau; Tauferon® (Pepgen Corp.); and the like. IFN-tau may comprise an amino acid sequence as set forth in any one of GenBank Accession Nos. P15696; P56828; P56832; P56829; P56831; Q29429; Q28595; Q28594; S08072; Q08071; Q08070; Q08053; P56830; P28169; P28172; and P28171. Any protease-resistant or protease-resistant, hyperglycosylated IFN-tau polypeptide variant that retains a desired pharmacologic activity of IFN-tau may be used in the methods or compositions of the invention.

[0204] Suitable known protease-resistant or protease-resistant, hyperglycosylated polypeptide variants include protease-resistant or protease-resistant, hyperglycosylated forms of any parent IFN-tau polypeptide. In one aspect, a known protease-resistant or protease-resistant, hyperglycosylated variant of a parent IFN-tau polypeptide has an amino acid sequence that differs from the amino acid sequence of the parent polypeptide to the extent that the variant comprises one or more glycosylation sites not found in the parent polypeptide; and comprises at least one mutated protease cleavage site in place of a native protease cleavage site found in a parent IFN-tau polypeptide.

IFN-ω

[0205] The amino acid sequence of any known IFN-omega can be modified to generate a subject synthetic Type I interferon receptor polypeptide agonist. The term interferon-omega (“IFN-ω”) includes IFN-ω polypeptides that are naturally occurring; and non-naturally-occurring IFN-ω polypeptides. Suitable IFN-ω include, but are not limited to, naturally-occurring IFNω; recombinant IFN-ω, e.g., Biomed 510 (BioMedicines); and the like. IFN-ω may comprise an amino acid sequence as set forth in GenBank Accession No. NP_{—}002168; or AAA70091.

[0206] Suitable known protease-resistant or protease-resistant, hyperglycosylated polypeptide variants include protease-resistant or protease-resistant, hyperglycosylated forms of any parent IFN-ω polypeptide. In one aspect, a known protease-resistant or protease-resistant, hyperglycosylated variant of a parent IFN-ω polypeptide has an amino acid sequence that differs from the amino acid sequence of the parent polypeptide to the extent that the variant comprises one or more glycosylation sites not found in the parent polypeptide; and comprises at least one mutated protease cleavage site in place of a native protease cleavage site found in the parent polypeptide.

[0207] In another aspect, the parent polypeptide is IFN-ω1 and the known protease-resistant or protease-resistant, hyperglycosylated polypeptide variant is an [R99N]IFN-ω1 glycopeptide, where the [R99N]IFN-ω1 glycopeptide is a variant of IFN-ω1 having (a) an asparagine residue substituted for the native arginine residue at amino acid position 99 in the amino acid sequence of IFN-ω1 and (b) a carbohydrate moiety covalently attached to the R-group of said asparagine residue; where the variant comprises at least one mutated protease cleavage site in place of a native protease cleavage iste found in the parent polypeptide.

[0208] In another aspect, the parent polypeptide is IFN-ω1 and the known protease-resistant or protease-resistant, hyperglycosylated polypeptide variant is an [G134N]IFN-ω1 glycopeptide, where the [G134N]IFN-ω1 glycopeptide is a variant of IFN-ω1 having (a) an asparagine residue substituted for the native glycine residue at amino acid position 134 in the amino acid sequence of IFN-ω1 and (b) a carbohydrate moiety covalently attached to the R-group of said asparagine residue; where the variant comprises at least one mutated protease cleavage site in place of a native protease cleavage site found in the parent polypeptide.

[0209] In another aspect, the parent polypeptide is IFN-ω1 and the known protease-resistant or protease-resistant, hyperglycosylated polypeptide variant is an [G134T]IFN-ω1 glycopeptide, where the [G134T]IFN-ω1 glycopeptide is a variant of IFN-ω1 having (a) an threonine residue substituted for the native glycine residue at amino acid position 134 in the amino acid sequence of IFN-ω1 and (b) a carbohydrate moiety covalently attached to the R-group of said threonine residue; where the variant comprises at least one mutated protease cleavage site in place of a native protease cleavage site found in the parent polypeptide.

[0210] In another aspect, the parent polypeptide is IFN-∫1 and the known protease-resistant or protease-resistant, hyperglycosylated polypeptide variant is an [S99N, G134N]IFN-∫1 glycopeptide, where the [S99N, G134N]IFN-ω1 glycopeptide is a variant of IFN-ω1 having (a) asparagine residues substituted for the native serine and glycine residues at amino acid positions 99 and 134, respectively, in the amino acid sequence of IFN-ω1 and (b) a carbohydrate moiety covalently attached to the R-group of each of said asparagine residues; where the variant comprises at least one mutated protease cleavage site in place of a native protease cleavage site found in the parent polypeptide.

[0211] In another aspect, the parent polypeptide is IFN-ω1 and the known protease-resistant or protease-resistant, hyperglycosylated polypeptide variant is an [S99N, G134T]IFN-ω1 glycopeptide, where the [S99N, G134T]IFN-ω1 glycopeptide is a variant of IFN-ω1 having (a) asparagine and threonine residues substituted for the native serine and glycine residues at amino acid positions 99 and 134, respectively, in the amino acid sequence of IFN-ω1 (as set forth in FIG. 24) and (b) a carbohydrate moiety covalently attached to the R-group of each of said asparagine and threonine residue; where the variant comprises at least one mutated protease cleavage site in place of a native protease cleavage site found in the parent polypeptide.

[0212] The numbering of amino acids, discussed in the context of amino acid replacements for generating hyperglycosylation variants of the parent protein therapeutic, coincides with the numbering of amino acids used to depict the Type I interferon amino acid sequences appearing in FIG. 24. In the context of amino acid replacements, for generating protease-resistant variants of the parent protein therapeutic, the numbering of amino acids used to describe IFN-omega variants coincides with the numbering of amino acids as depicted in FIG. 24.

[0213] In another aspect, a known protease-resistant or protease-resistant, hyperglycosylated polypeptide variant of a parent interferon-omega therapeutic differs from the parent interferon-omega therapeutic to the extent that the known protease-resistant or protease-resistant, hyperglycosylated polypeptide variant comprises (1) a carbohydrate moiety covalently attached to a non-native glycosylation site not found in the parent interferon-omega therapeutic and/or (2) a carbohydrate moiety covalently attached to a native glycosylation site found but not glycosylated in the parent interferon-omega therapeutic; and comprises at least one mutated protease cleavage site in place of a native protease cleavage site found in the parent polypeptide.

Interferon-Gamma

[0214] The nucleic acid sequences encoding IFN-γ polypeptides may be accessed from public databases, e.g., GenBank, journal publications, and the like. While various mammalian IFN-gamma polypeptides are of interest, for the treatment of human disease, generally the human protein will be used. Human IFN-gamma coding sequence may be found in Genbank, accession numbers X13274; V00543; and NM_{—}000619. The corresponding genomic sequence may be found in Genbank, accession numbers J00219; M37265; and V00536. See, for example. Gray et al. (1982) Nature 295:501 (Genbank X13274); and Rinderknecht et al. (1984) J.B.C. 259:6790. In some embodiments, the IFN-γ is glycosylated.

[0215] IFN-γ-1b (Actimmune®; human interferon) is a single-chain polypeptide of 140 amino acids. It is made recombinantly in E. coli and is unglycosylated (Rinderknecht et al. 1984, J. Biol. Chem. 259:6790-6797). Recombinant IFN-gamma as discussed in U.S. Pat. No. 6,497,871 is also suitable for use herein.

[0216] The term “IFN-gamma” includes any of natural IFN-gamma, recombinant IFN-gamma and the derivatives thereof so far as they have an IFN-γ activity, particularly human IFN-gamma activity. Human IFN-gamma exhibits the antiviral and anti-proliferative properties characteristic of the interferons, as well as a number of other immunomodulatory activities, as is known in the art. Although IFN-gamma is based on the sequences as provided above, the production of the protein and proteolytic processing can result in processing variants thereof. The unprocessed sequence provided by Gray et al., supra, consists of 166 amino acids (aa). Although the recombinant IFN-gamma produced in E. coli was originally believed to be 146 amino acids, (commencing at amino acid 20) it was subsequently found that native human IFN-gamma is cleaved after residue 23, to produce a 143 aa protein, or 144 aa if the terminal methionine is present, as required for expression in bacteria. During purification, the mature protein can additionally be cleaved at the C terminus after reside 162 (referring to the Gray et al. sequence), resulting in a protein of 139 amino acids, or 140 amino acids if the initial methionine is present, e.g. if required for bacterial expression. The N-terminal methionine is an artifact encoded by the mRNA translational “start” signal AUG that, in the particular case of E. coli expression is not processed away. In other microbial systems or eukaryotic expression systems, methionine may be removed.

[0217] Any of the native IFN-gamma peptides, modifications and variants thereof, or a combination of one or more peptides can serve as a parent polypeptide referent in connection with the present methods and/or compositions. IFN-gamma peptides of interest include fragments, and can be variously truncated at the carboxyl terminus relative to the full sequence. Such fragments continue to exhibit the characteristic properties of human gamma interferon, so long as amino acids 24 to about 149 (numbering from the residues of the unprocessed polypeptide) are present. Extraneous sequences can be substituted for the amino acid sequence following amino acid 155 without loss of activity. See, for example, U.S. Pat. No. 5,690,925. Native IFN-gamma moieties include molecules variously extending from amino acid residues 24-150; 24-151, 24-152; 24-153, 24-155; and 24-157.

[0218] Any known protease-resistant or protease-resistant, hyperglycosylated IFN-gamma polypeptide variant that retains a desired pharmacologic activity of a parent IFN-gamma polypeptide may be used in the methods and/or compositions of the invention.

[0219] In another aspect, a known protease-resistant or protease-resistant, hyperglycosylated polypeptide variant of a parent interferon-gamma therapeutic differs from the parent interferon-gamma therapeutic to the extent that the known protease-resistant or protease-resistant, hyperglycosylated polypeptide variant comprises (1) a carbohydrate moiety covalently attached to a non-native glycosylation site not found in the parent interferon-gamma therapeutic and/or (2) a carbohydrate moiety covalently attached to a native glycosylation site found but not glycosylated in the parent interferon-gamma therapeutic; and comprises at least one mutated protease cleavage site in place of a native protease cleavage site found in the parent IFN-γ polypeptide.

[0220] In another aspect, the parent protein therapeutic is interferon gamma-1b and the known protease-resistant or protease-resistant, hyperglycosylated polypeptide variant of the parent interferon gamma-1b therapeutic is a protease-resistant variant of glycosylated native (wild-type) human IFN-γ. Glycosylated native (wild-type) human IFN-γ is described in WO 02/081507.

Erythropoietin

[0221] In some embodiments, a known protease-resistant or protease-resistant, hyperglycosylated polypeptide variant comprises an erythropoietin amino acid sequence comprising at least one non-native glycosylation site compared to a parent erythropoietin polypeptide; and comprises at least one mutated protease cleavage site in place of a native protease cleavage site found in the parent EPO polypeptide. Suitable erythropoietin polypeptides include those proteins that have the biological activity of human erythropoietin such as erythropoietin analogs; erythropoietin isoforms; erythropoietin fragments; hybrid erythropoietin proteins; fusion proteins; and oligomers and multimers of any of the foregoing.

[0222] Specific examples of erythropoietin include, but are not limited to, human erythropoietin (see, e.g., Jacobs et al. (1985) Nature 313:806-810; and Lin et al. (1985) Proc Natl Acad Sci USA 82:7580-7584); erythropoietin polypeptides discussed in U.S. Pat. Nos. 6,696,056 and 6,585,398; the amino acid sequences provided in GenBank Accession Nos. NP_{—}00790 and CAA26095; Epoetin alfa (EPREX®; ERYPO®; Novel erythropoiesis stimulating protein (NESP) (a hyperglycosylated analog of recombinant human eryhropoietin (Epoetin) described in European patent application EP640619); human erythropoietin analog—human serum albumin fusion proteins described in International patent application WO9966054; erythropoietin mutants described in International patent application WO9938890; erythropoietin omega, which may be produced from an Apa I restriction fragment of the human erythropoietin gene described in U.S. Pat. No. 5,688,679; altered glycosylated human erythropoietin described in International patent application WO9911781; PEG conjugated erythropoietin analogs described in WO9805363 or U.S. Pat. No. 5,643,575. Specific examples of cell lines modified for expression of endogenous human erythropoietin are described in international patent applications WO9905268 and WO9412650.

[0223] In one aspect, a known protease-resistant or protease-resistant, hyperglycosylated variant of a parent erythropoietin polypeptide retains the hematopoietic activity of the parent erythropoietin as determined by monitoring and measurement of the patient's hematocrit.

[0224] In another aspect, the parent polypeptide is EPOGEN® epoetin alfa and the known protease-resistant or protease-resistant, hyperglycosylated polypeptide variant is a protease-resistant variant of ARANESP® darbepoetin alfa.

Insulin

[0225] In some embodiments, a known protease-resistant or protease-resistant, hyperglycosylated polypeptide variant comprises an insulin amino acid sequence comprising at least one non-native glycosylation site compared to a parent insulin polypeptide; and comprises at least one mutated protease cleavage site in place of a native protease cleavage site found in the parent insulin polypeptide. Suitable insulin polypeptides include, but are not limited to, proinsulin, preproinsulin, and the insulin forms disclosed in U.S. Pat. Nos. 4,992,417; 4,992,418; 5,474,978; 5,514,646; 5,504,188; 5,547,929; 5,650,486; 5,693,609; 5,700,662; 5,747,642; 5,922,675; 5,952,297; 6,034,054; and 6,211,144; and published PCT applications WO 00/121197; WO 09/010645; and WO 90/12814. Insulin analogs include, but are not limited to, superactive insulin analogs, monomeric insulins, and hepatospecific insulin analogs. Various forms of insulin include Humalog®; Humalog® Mix 50/50™; Humalog® Mix 75/25™; Humulin® 50/50; Humulin® 70/30; Humulin® L; Humulin® N; Humulin® R; Humulin® Ultralente; Lantus®; Lente® Iletin® II; Lente® Insulin; Lente® L; Novolin® 70/30; Novolin® L; Novolin® N; Novolin®R; NovoLog™; NPH Iletin® I; NPH-N; Pork NPH Iletin® II; Pork Regular Iletin® II; Regular (Concentrated) Iletin® II U-500; Regular Iletin® I; and Velosulin® BR Human (Buffered).

[0226] Insulin polypeptides suitable for modification and use according to the present invention include analogs of human insulin wherein position B28 is Asp, Lys, Leu, Val or Ala and position B29 is Lys or Pro; des(B28-B30) human insulin; des(B27) human insulin; des(B30) human insulin; an analog of human insulin in which position B28 is Asp and position B29 is Lys or Pro; an analog of human insulin in which position B28 is Lys, and position B29 is Lys or Pro; Asp^{B28} human insulin; Lys^{B28} Pro^{B29} human insulin; B29-N^{ε}-myristoyl-des(B30) human insulin; B29-N^{ε}-palmitoyl-des(B30) human insulin; B29-N^{ε}-myristoyl human insulin; B29-N^{ε}-palmitoyl human insulin; B28-N^{ε}-myristoyl Lys^{B28} Pro^{B29} human insulin; B28-N^{ε}-palmitoyl Lys^{B28} Pro^{B29} human insulin; B30-N^{ε}-myristoyl-Thr^{B29} Lys^{B30} human insulin; B30-N^{ε}-palmitoyl-Thr^{B29} Lys^{B30} human insulin; B29-N^{ε}-(N-palmitoyl-γ-glutamyl)-des(B30) human insulin; B29-N^{ε}-(N-lithocholyl-γ-glutamyl)-des(B30) human insulin; B29-N^{ε}-(co-carboxyheptadecanoyl)-des(B30) human insulin; and B29-N^{ε}-(ω-carboxyheptadecanoyl) human insulin.

[0227] The amino acid sequences of various insulin polypeptides are publicly available in, e.g., public databases such as GenBank, journal articles, patents and published patent applications, and the like. For example, the amino acid sequences of human insulin are found in GenBank under the following accession numbers: CAA00714; CAA00713; CAA00712; CAA01254; 1HISA and 1HISB; 1 HIQA and 1 HIQB; 1HITA and 1HITB; 1 HLSA and 1HLSB; 1VKTA and 1VKTB.

[0228] In addition, insulin derivatives and protease-resistant or protease-resistant, hyperglycosylated forms thereof can be used as parent polypeptides and known protease-resistant or protease-resistant, hyperglycosylated polypeptide variants, respectively, in methods and/or compositions of the present invention. Insulin derivatives, include, but not are limited to, acylated insulin, glycosylated insulin, and the like. Examples of acylated insulin include those disclosed in U.S. Pat. No. 5,922,675, e.g., insulin derivatized with a C₆-C₂₁ fatty acid (e.g., myristic, pentadecylic, palmitic, heptadecylic, or stearic acid) at an α- or ε-amino acid of glycine, phenylalanine, or lysine.

Antibodies

[0229] In some embodiments, a known protease-resistant or protease-resistant, hyperglycosylated polypeptide variant comprises an antibody polypeptide amino acid sequence, and further comprises at least one non-native glycosylation site compared to a parent antibody polypeptide; and further comprises at least one mutated protease cleavage site in place of a native protease cleavage site found in the parent polypeptide. Suitable antibodies include, but are not limited to, antibodies of various isotypes (e.g., IgG1, IgG3 and IgG4); monoclonal antibodies produced by any means; humanized antibodies; chimeric antibodies; single-chain antibodies; antibody fragments such as Fv, F(ab′)₂, Fab′, Fab, Facb, and the like; and the like, provided that the antibody is capable of binding to antigen. Suitable monoclonal antibodies include antibodies that are specific for a cell surface receptor and that function as antagonists to the receptor, including, but not limited to, antibody to TGF-β receptor, antibody to TNF-α receptor, antibody to VEGF receptor (see, e.g., U.S. Pat. Nos. 6,617,160, 6,448,077, and 6,365,157), antibody to epidermal growth factor receptor, and the like; antibodies specific for receptor ligands, including, but not limited to, antibody to TGF-β, antibody to TNF-α, antibody to VEGF, and the like; antibody specific for a tumor-associated antigen; antibody specific for CD20; antibody specific for epidermal growth factor receptor-2; antibody specific for the receptor binding domain of IgE; antibody specific for adhesion molecules (e.g., antibody specific for α subunit (CD11a) of LFA-1; antibody specific for α4β7; etc.); and the like.

Blood Factors

[0230] In some embodiments, a known protease-resistant or protease-resistant, hyperglycosylated polypeptide variant comprises a blood factor polypeptide amino acid sequence, and further comprises at least one non-native glycosylation site compared to a parent blood factor polypeptide; and comprises at least one mutated protease cleavage site in place of a native protease cleavage site found in a parent polypeptide. Suitable blood factor polypeptides include, but are not limited to, a tissue plasminogen activator (TPA); Factor VIIa; Factor VIII; Factor IX; β-globin; hemoglobin; and the like. The amino acid sequences of various blood factors are publicly available, e.g., in public databases such as GenBank; journal articles; patents and published patent applications; and the like. For example, the amino acid sequences of human TPA are found under GenBank Accession Nos. P0070, NP_{—}127509, and NP-000921; the amino acid sequence of a human Factor VIIa is found under GenBank Accession No. KFHU7; the amino acid sequence of a human Factor IX is found under GenBank Accession Nos. P00740 and NP_{—}000124; the amino acid sequence of a human Factor VIII is found under GenBank Accession Nos. AAH64380, AAH22513, and P00451.

[0231] In one aspect, the parent polypeptide is ACTIVASE® alteplase and the protease-resistant, polypeptide variant is a protease-resistant variant of TNKase™ tenecteplase.

Colony Stimulating Factors

[0232] In some embodiments, a known protease-resistant or protease-resistant, hyperglycosylated polypeptide variant comprises a colony stimulating factor polypeptide amino acid sequence, and further comprises at least one non-native glycosylation site compared to a parent colony stimulating factor polypeptide; and comprises at least one mutated protease cleavage site in place of a native protease cleavage site found in the parent polypeptide. Suitable colony stimulating factor polypeptides include, but are not limited to, granulocyte colony stimulating factor (G-CSF), such as NEUPOGEN® filgrastim and NEULASTA™ pegfilgrastim, granulocyte-monocyte colony stimulating factor (GM-CSF), such as LEUKINE® sargramostim, macrophage colony stimulating factor, megakaryocyte colony stimulating factor; IL-3; stem cell factor (SCF); and the like.

[0233] The amino acid sequences of various blood factors are publicly available, e.g., in public databases such as GenBank; journal articles; patents and published patent applications; and the like. For example, amino acid sequences of IL-3 are disclosed in U.S. Pat. Nos. 4,877,729 and 4,959,455, and International Patent Publication No. WO 88/00598; amino acid sequences of human G-CSF are disclosed in U.S. Pat. No. 4,810,643; WO 91/02754 and WO 92/04455 disclose the amino acid sequence of fusion proteins comprising IL-3; WO 95/21197, WO 95/21254, and U.S. Pat. No. 6,730,303 disclose fusion proteins capable of broad multi-functional hematopoietic properties; amino acid sequences of human G-CSF are found under GenBank Accession Nos. NP_{—}757374, P09919, FQHUGL, and NP_{—}000750; amino acid sequences of human GM-CSF are found under GenBank Accession Nos. NP_{—}000749 and P04141; amino acid sequences of IL-3 are found under GenBank Accession Nos. AAH66272, AAH66273, and AAH66276; etc.

Growth Hormones

[0234] In some embodiments, a known protease-resistant or protease-resistant, hyperglycosylated polypeptide variant comprises a growth hormone polypeptide amino acid sequence, and further comprises at least one non-native glycosylation site compared to a parent growth hormone polypeptide; and comprises at least one mutated protease cleavage site in place of a native protease cleavage site found in the parent polypeptide. Suitable growth hormone polypeptides include, but are not limited to, somatotropin; a human growth hormone; any of the growth hormone variants disclosed in U.S. Pat. Nos. 6,143,523, 6,136,563, 6,022,711, and 5,688,666; fusion proteins comprising a growth hormone, e.g., as disclosed in U.S. Pat. No. 5,889,144; growth hormone fragments that retain growth hormone activity; a growth hormone receptor polypeptide agonist as disclosed in U.S. Pat. No. 6,387,879; and the like. Growth hormones include alternative forms of known growth hormones, e.g., alternative forms of human growth hormone (hGH), including naturally-occurring derivatives, variants and metabolic products, degradation products primarily of biosynthetic hGH and engineered variants of hGH produced by recombinant methods (see, e.g., U.S. Pat. No. 6,348,444).

Growth Factors

[0235] In some embodiments, a known protease-resistant or protease-resistant, hyperglycosylated polypeptide variant comprises a growth factor amino acid sequence comprising at least one non-native glycosylation site compared to a parent growth hormone polypeptide; and comprises at least one mutated protease cleavage site in place of a native protease cleavage site found in the parent polypeptide. Suitable growth factor polypeptides include, but are not limited to, keratinocyte growth factor; an acidic fibroblast growth factor, a stem cell factor, a basic fibroblast growth factor, a hepatocyte growth factor, an insulin-like growth factor, etc.; active fragments of a growth factor; fusion proteins comprising a growth factor; and the like. The amino acid sequences of various growth factors are publicly available, e.g., in public databases such as GenBank; journal articles; patents and published patent applications; and the like. For example, amino acid sequences of bFGF are found under GenBank Accession Nos. AAB20640, AAA57275, A43498, and AAB20639; amino acid sequences of aFGF are found under GenBank Accession Nos. AAB29059, CAA4666 1, and 1605206A; amino acid sequences of stem cell factor are found under GenBank Accession Nos. AAH69733, AAH69783, and AAH69797; amino acid sequences of keratinocyte growth factor are found under GenBank Accession Nos. 035565, AAL05875, and P21781; amino acid sequences of hepatocye growth factor are found under GenBank Accession Nos. AAA64239, AAB20169, and CAA40802.

Soluble Receptors

[0236] In some embodiments, a known protease-resistant or protease-resistant, hyperglycosylated polypeptide variant comprises a soluble receptor polypeptide amino acid sequence, and further comprises at least one non-native glycosylation site compared to a parent soluble receptor polypeptide; and comprises at least one mutated protease cleavage site in place of a native protease cleavage site found in the parent polypeptide. Suitable soluble receptor polypeptides include, but are not limited to, a TNF-α-binding soluble receptor; a soluble VEGF receptor; a soluble interleukin receptor; a soluble IL-1 receptor; a soluble type II IL-1 receptor; a soluble γ/βT cell receptor; ligand-binding fragments of a soluble receptor; and the like. Suitable soluble receptors bind a ligand that, under normal physiological conditions, binds to and activates the corresponding membrane-bound or cell surface receptor. Thus, a suitable soluble receptor is one that functions as a receptor antagonist, by binding the ligand that would ordinarily bind the receptor in its native (e.g., membrane-bound) form.

[0237] The amino acid sequences of various soluble receptors are publicly available, e.g., in public databases such as GenBank; journal articles; patents and published patent applications; and the like. For example, amino acid sequences of soluble VEGF receptors are found under GenBank Accession Nos. AAC50060 and NP_{—}002010; soluble VEGF receptors are described in U.S. Pat. Nos. 6,383,486, 6,375,929, and 6,100,071; soluble IL-4 receptors are described in U.S. Pat. No. 5,599,905; soluble IL-1 receptors are described in U.S. Patent Publication No. 20040023869; etc.

Chemokines

[0238] In some embodiments, a known protease-resistant or protease-resistant, hyperglycosylated polypeptide variant comprises a chemokine polypeptide amino acid sequence, and further comprises at least one non-native glycosylation site compared to a parent chemokine polypeptide; and further comprises at least one mutated protease cleavage site in place of a native protease cleavage site found in the parent polypeptide. Suitable chemokine polypeptides include, but are not limited to, IP-10; Mig; Groα/IL-8, RANTES; MIP-1α; MIP-1β; MCP-1; PF-4; and the like; as well as fusion proteins comprising a chemokine. The amino acid sequences of various chemokines are publicly available, e.g., in public databases such as GenBank; journal articles; patents and published patent applications; and the like. For example, amino acid sequences of IP-10 are disclosed in U.S. Pat. Nos. 6,491,906, 5,935,567, 6,153,600, 5,728,377, and 5,994,292; amino acid sequences of Mig are disclosed in U.S. Pat. No. 6,491,906, and Farber (1993) Biochemical and Biophysical Research Communications 192(1):223-230; amino acid sequences of RANTES are disclosed in U.S. Pat. Nos. 6,709,649, 6,168,784, and 5,965,697; etc.

Anziozenic Agents

[0239] In some embodiments, a known protease-resistant or protease-resistant, hyperglycosylated polypeptide variant comprises an angiogenic polypeptide amino acid sequence, and further comprises at least one non-native glycosylation site compared to a parent angiogenic polypeptide; and comprises at least one mutated protease cleavage site in place of a native protease cleavage site found in the parent polypeptide. Suitable angiogenic polypeptides include, but are not limited to, VEGF polypeptides, including VEGF₁₂₁, VEGF₁₆₅, VEGF-C, VEGF-2, etc.; transforming growth factor-beta; basic fibroblast growth factor; glioma-derived growth factor; angiogenin; angiogenin-2; and the like. The amino acid sequences of various angiogenic agents are publicly available, e.g., in public databases such as GenBank; journal articles; patents and published patent applications; and the like. For example, amino acid sequences of VEGF polypeptides are disclosed in U.S. Pat. Nos. 5,194,596, 5,332,671, 5,240,848, 6,475,796, 6,485,942, and 6,057,428; amino acid sequences of VEGF-2 polypeptides are disclosed in U.S. Pat. Nos. 5,726,152 and 6,608,182; amino acid sequences of glioma-derived growth factors having angiogenic activity are disclosed in U.S. Pat. Nos. 5,338,840 and 5,532,343; amino acid sequences of angiogenin are found under GenBank Accession Nos. AAA72611, AAA51678, AAA02369, AAL67710, AAL67711, AAL67712, AAL67713, and AAL67714; etc.

Neuroactive Peptides

[0240] In some embodiments, a known protease-resistant or protease-resistant, hyperglycosylated polypeptide variant comprises a neuroactive polypeptide amino acid sequence, and further comprises at least one non-native glycosylation site compared to a parent neuroactive polypeptide; and comprises at least one mutated protease cleavage site in place of a native protease cleavage site found in the parent polypeptide. Suitable neuroactive polypeptides include, but are not limited to, nerve growth factor, bradykinin, cholecystokinin, gastin, secretin, oxytocin, gonadotropin-releasing hormone, beta-endorphin, enkephalin, substance P, somatostatin, prolactin, galanin, growth hormone-releasing hormone, bombesin, dynorphin, neurotensin, motilin, thyrotropin, neuropeptide Y, luteinizing hormone, calcitonin, insulin, glucagons, vasopressin, angiotensin II, thyrotropin-releasing hormone, vasoactive intestinal peptide, a sleep peptide, etc.

Additional Proteins

[0241] In its broadest sense, the compositions and methods of the invention contemplate the use of any known protease-resistant or protease-resistant, hyperglycosylated polypeptide variant that comprises an amino acid sequence derived from a parent polypeptide of pharmacologic interest; and that further comprises at least one non-native glycosylation site compared to the parent polypeptide; and that further comprises at least one mutated protease cleavage site in place of a native protease cleavage site found in the parent polypeptide. Other proteins of pharmacologic interest include, but are not limited to, a thrombolytic agent, an atrial natriuretic peptide, bone morphogenic protein, thrombopoietin, glial fibrillary acidic protein, follicle stimulating hormone, a human alpha-1 antitrypsin, a leukemia inhibitory factor, a transforming growth factor, an insulin-like growth factor, a luteinizing hormone, a macrophage activating factor, tumor necrosis factor, a neutrophil chemotactic factor, a nerve growth factor a tissue inhibitor of metalloproteinases; a vasoactive intestinal peptide, angiotropin, fibrin; hirudin; a leukemia inhibitory factor; and the like. The amino acid sequences of various therapeutic proteins are publicly available, e.g., in public databases such as GenBank; journal articles; patents and published patent applications; and the like. For example, amino acid sequences of tissue plasminogen activator are found under GenBank Accession Nos. P00750, AAA01895, AAA01378, AAB06956, and CAA00642.

[0242] In some embodiments, a known protease-resistant or protease-resistant, hyperglycosylated polypeptide variant comprises a relaxin amino acid sequence, and further comprises at least one non-native glycosylation site compared to a parent relaxin polypeptide; and further comprises at least one mutated protease cleavage site in place of a native protease cleavage site found in the parent polypeptide. The relaxin polypeptide can be a naturally-occurring relaxin or a synthetic relaxin. Naturally occurring biologically active relaxin may be derived from human, murine (i.e., rat or mouse), porcine, or other mammalian sources. The term “relaxin” encompasses human H1 preprorelaxin, prorelaxin, and relaxin; H2 preprorelaxin, prorelaxin, and relaxin; recombinant human relaxin (rhRLX); and H3 preprorelaxin, prorelaxin, and relaxin. H3 relaxin has been described in the art. See, e.g., Sudo et al. (2003) J Biol Chem. 7;278(10):7855-62. The amino acid sequences of human relaxin are described in the art. For example, human relaxin amino acid sequences are found under the following GenBank Accession Nos.: Q3WXF3, human H3 prorelaxin; P04808, human H1 prorelaxin; NP_{—}604390 and NP_{—}005050, human H2 prorelaxin; AAH05956, human relaxin 1 preproprotein; NP_{—}008842, human H1 preprorelaxin; etc. The relaxin polypeptide can be a relaxin polypeptide comprising A and B chains having N- and/or C-terminal truncations. For example, in H2 relaxin, the A chain can be varied from A(1-24) to A(10-24) and B chain from B(1-33) to B(10-22); and in H1 relaxin, the A chain can be varied from A(1-24) to A(10-24) and B chain from B(1-32) to B(10-22). Also suitable for modification is a relaxin analog having an amino acid sequence which differs from a wild-type (e.g., naturally-occurring) sequence, including, but not limited to, relaxin analogs disclosed in U.S. Pat. No. 5,811,395, and U.S. Pat. No. 6,200,953. Other suitable relaxins and relaxin formulations are found in U.S. Pat. No. 5,945,402. Other possible relaxin polypeptides include relaxin having a replacement of one or more of the natural amino-acids in the B and/or A chains with a different amino acid (including the D-form of a natural amino-acid), including, but not limited to, replacement of the Met moiety at B24 with norleucine (Nle), valine (Val), alanine (Ala), glycine (Gly), serine (Ser), or homoserine (HomoSer). Other possible relaxin polypeptides include relaxin having an amino acid substitutions at the B/C and C/A junctions of prorelaxin, which modifications facilitate cleavage of the C chain from prorelaxin; and variant relaxin comprising a non-naturally occurring C peptide, e.g., as described in U.S. Pat.No. 5,759,807.

Protease-resistant or Protease-resistant, Hyperglycosylated Polypeptide Variants of Parent Cytokine Polypeptides

[0243] In some embodiments, a known protease-resistant or protease-resistant, hyperglycosylated polypeptide variant is a variant of a parent protein therapeutic, and the parent protein therapeutic is a cytokine. In some embodiments, a known protease-resistant or protease-resistant, hyperglycosylated polypeptide variant comprises one or more of the amino acid replacements, compared to an unmodified parent cytokine, as set forth in an amino acid sequence as depicted in any one of SEQ ID NOs:2-181 (IFN-α2b variants), 233-289 (IFN-β variants), 290-311 (IFN-γvariants), 362-400 (GM-CSF variants), 631-662 (G-CSF variants), 850-895 (hGH variants), 940-977 (EPO variants), 978-988 (IFN-α variants), and 989-1302 (IFN-β variants); and further comprises an amino acid sequence that differs from the amino acid sequence of the parent polypeptide to the extent that the variant comprises one or more glycosylation sites not found in the parent polypeptide. Exemplary amino acid replacements that generate hyperglycosylation are depicted in FIGS. 23-30. In some embodiments, a known protease-resistant or protease-resistant, hyperglycosylated polypeptide variant is a structural homolog of a protein comprising an amino acid sequence as set forth in any one of SEQ ID NOs:2-181 (IFN-α2b variants), 233-289 (IFN-β variants), 290-311 (IFN-γ variants), 362-400 (GM-CSF variants), 631-662 (G-CSF variants), 850-895 (hGH variants), 940-977 (EPO variants), 978-988 (IFN-α variants), and 989-1302 (IFN-β variants); and further comprises an anino acid sequence that differs from the amino acid sequence of the parent polypeptide to the extent that the variant comprises one or more glycosylation sites not found in the parent polypeptide.

[0244] In some embodiments, a known protease-resistant or protease-resistant, hyperglycosylated polypeptide variant comprises one or more of the amino acid replacements, compared to an unmodified parent cytokine, as set forth in an amino acid sequence as set forth in any one of SEQ ID NOs:87, 89, 90, 93, 96, 101, 103, 107, 124, 979, 980, 983, 984, 986, and 987; and further comprises an amino acid sequence that differs from the amino acid sequence of the parent polypeptide to the extent that the variant comprises one or more glycosylation sites not found in the parent polypeptide.

[0245] In some embodiments, a known protease-resistant or protease-resistant, hyperglycosylated polypeptide variant is a cytokine modified on the basis of 3-dimensional structural homology with any one of SEQ ID NOs:87, 89, 90, 93, 96, 101, 103, 107, 124, 979, 980, 983, 984, 986, and 987 ; where the variant further comprises an amino acid sequence that differs from the amino acid sequence of the parent polypeptide to the extent that the variant comprises one or more glycosylation sites not found in the parent polypeptide.

[0246] In some embodiments, the known protease-resistant or protease-resistant, hyperglycosylated cytokine variant is selected from protease-resistant or protease-resistant, hyperglycosylated variants of: interleukin-10 (IL-10), interferon beta (IFNβ), interferon alpha-2a (IFN-α2a), interferon alpha-2b (IFN-α2b), interferon gamma (IFN-γ), granulocyte colony stimulating factor (G-CSF), leukemia inhibitory factor (LIF), human growth hormone (hGH), ciliary neurotrophic factor (CNTF), leptin, oncostatin M, interleukin-6 (IL-6), interleukin-12 (IL-12), erythropoietin (EPO), granulocyte-macrophage colony stimulating factor (GM-CSF), interleukin-2 (IL-2), interleukin-3 (IL-3), interleukin-4 (IL-4), interleukin-5 (IL-5), interleukin-13 (IL-13), Flt3 ligand and stem cell factor (SCF). In particular embodiments, the known protease-resistant or protease-resistant, hyperglycosylated cytokine variant is selected from protease-resistant or protease-resistant, hyperglycosylated variants of IFNβ, IFN-α2a, IFN-α2b, IFN-γ, G-CSF, hGH, EPO, and GM-CSF. In particular embodiments, the known protease-resistant cytokine variant is an interferon.

[0247] The known protease-resistant or protease-resistant, hyperglycosylated cytokine variant of a parent cytokine exhibits increased resistance to proteolysis compared to the unmodified (parent) cytokine. In some embodiments, the known protease-resistant or protease-resistant, hyperglycosylated cytokine variant is an interferon variant. In some embodiments, the known protease-resistant or protease-resistant, hyperglycosylated cytokine variant is an IFN-α2a variant. In some embodiments, the known protease-resistant or protease-resistant, hyperglycosylated cytokine variant is an IFN-α2b variant. In some embodiments, the known protease-resistant or protease-resistant, hyperglycosylated cytokine variant is an IFN-β variant. In some embodiments, the known protease-resistant or protease-resistant, hyperglycosylated cytokine variant is an IFN-γ variant. In some embodiments, the known protease-resistant or protease-resistant, hyperglycosylated cytokine variant is a variant of a consensus interferon comprising the amino acid sequence identified as SEQ ID NO:232, or as shown in FIG. 9, or as depicted in FIG. 24.

IFN-α Polypeptide Variants

[0248] In some embodiments, a known protease-resistant or protease-resistant, hyperglycosylated polypeptide variant comprises one or more of the mutations shown in Table 1, where the amino acid numbering coincides with the amino acid numbering set forth in FIG. 1; and further comprises an amino acid sequence that differs from the amino acid sequence of the parent polypeptide to the extent that the variant comprises one or more glycosylation sites not found in the parent polypeptide.

TABLE 1

| IFN-α LEAD | SEQ ID N° | Mutation(s) |
|---|---|---|
| 1 | 983 | K121Q/P109A |
| 2 | 987 | E159H/Y89H |
| 3 | 124 | E159Q |
| 4 | 90 | E58H |
| 5 | 89 | E58Q |
| 6 | 979 | E41H/Y89H/N45D |
| 7 | 103 | L117I |
| 8 | 986 | R125H/M111V |
| 9 | 96 | E107H |
| 10 | 101 | E113H |
| 11 | 87 | E41Q |
| 12 | 107 | R125Q |
| 13 | 985 | L117V/A139G |
| 14 | 980 | E41Q/D94G |
| 15 | 93 | E78H |
| 16 | 984 | K133Q/K121Q/P109A/G102R |

[0249] In one aspect, the parent polypeptide is IFN-α2a or IFN-α2b and the known protease-resistant or protease-resistant, hyperglycosylated polypeptide variant comprises one or more single amino acid replacements of the IFN-α2a amino acid sequence depicted in FIG. 1 or of the IFN-α2b amino acid sequence depicted in FIG. 2, corresponding to the replacement of: L by V at position 3; L by I at position 3; P by S at position 4; P by A at position 4; R by H at position 12; R by Q at position 12; R by H at pposition 13; R by Q at position 13; M by V at position 16; M by I at position 16; R by H at position 22; R by Q at position 22; R or K by H at position 23; R or K by Q at position 23; F by I at position 27; F by V at position 27; L by V at position 30; L by I at position 30; K by Q at position 31; K by T at position 31; R by H at position 33; R by Q at position 33; E by Q at position 41; E by H at position 41; K by Q at position 49; K by T at position 49; E by Q at position 58; E by H at position 58; K by Q at position 70; K by T at position 70; E by Q at position 78; E by H at position 78; K by Q at position 83; K by T at position 70; E by H at position 89; Y by I at position 89; E by Q at position 96; E by H at position 96; E by Q at position 107; E by H at position 107; P by S at position 109; P by A at position 109; L by V at position 110; L by I at position 110; M by V at position 111; M by I at position 111; E by Q at position 113; E by H at position 113; L by V at position 117; L by I at position 117; R by H at position 120; R by Q at position 120; K by Q at position 121; K by T at position 121; R by H at position 125; R by Q at position 125; L by V at position 128; L by I at position 128; K by Q at position 131; K by T at position 131; E by Q at position 132; E by H at position 132; K by Q at position 133; K by T at position 1.33; K by Q at position 134; K by T at position 134; Y by H at position 135; Y by I at position 135; P by S at position 137; P by A at position 137; M by V at position 148; M by I at position 148; R by H at position 149; R by Q at position 149; E by Q at position 159; E by H at position 159; L by V at position 161; L by I at position 161; R by H at position 162; R by Q at position 162; K by Q at position 164; K by T at position 164; E by Q at position 165; and E by H at position 165, wherein residue 1 corresponds to residue 1 of the mature IFN-α2a protein as depicted in FIG. 1 or wherein residue 1 corresponds to residue 1 of the mature IFN-α2b protein as depicted in FIG. 2; and further comprises an amino acid sequence that differs from the amino acid sequence of the parent polypeptide to the extent that the variant comprises one or more glycosylation sites not found in the parent polypeptide.

[0250] In another aspect, the parent polypeptide is IFN-α2a or IFN-α2b, and the known protease-resistant or protease-resistant, hyperglycosylated polypeptide variant comprises one or more single amino acid replacements of the IFN-α2a amino acid sequence depicted in FIG. 1 or of the IFN-α2b amino acid sequence depicted in FIG. 2, corresponding to: F by V at position 27; R by H at position 33; E by Q at position 41; E by H at position 41; E by Q at position 58; E by H at position 58; E by Q at position 78; E by H at position 78; Y by H at position 89; E by Q at position 107; E by H at position 107; P by A at position 109; L by V at position 110; M by V at position 111; E by Q at position 113; E by H at position 113; L by V at position 117; L by I at position 117; K by Q at position 121; K by T at position 121; R by H at position 125; R by Q at position 125; K by Q at position 133; K by T at position 133; E by Q at position 159 and E by H at position 159, wherein residue 1 corresponds to residue 1 of the mature IFN-α2a protein as depicted in FIG. 1 or wherein residue 1 corresponds to residue 1 of the mature IFN-α2b protein as depicted in FIG. 2; and further comprises an amino acid sequence that differs from the amino acid sequence of the parent polypeptide to the extent that the variant comprises one or more glycosylation sites not found in the parent polypeptide.

[0251] In another aspect, the parent polypeptide is IFN-α2a or IFN-α2b, and the known protease-resistant or protease-resistant, hyperglycosylated polypeptide variant comprises one or more sets of dual-amino acid replacements in the IFN-α2a amino acid sequence depicted in FIG. 1, or in the IFN-α2b amino acid sequence depicted in FIG. 2, corresponding to:

[0252] D by N at position 2 and P by S at position 4;

[0253] D by N at position 2 and P by T at position 4;

[0254] L by N at position 3 and Q by S at position 5;

[0255] L by N at position 3 and Q by T at position 5;

[0256] P by N at position 4 and T by S at position 6;

[0257] P by N at position 4 and T by T at position 6;

[0258] Q by N at position 5 and H by S at position 7;

[0259] Q by N at position 5 and H by T at position 7;

[0260] T by N at position 6 and S by S at position 8;

[0261] T by N at position 6 and S by T at position 8;

[0262] H by N at position 7 and L by S at position 9;

[0263] H by N at position 7 and L by T at position 9;

[0264] S by N at position 8 and G by S at position 10;

[0265] S by N at position 8 and G by T at position 10;

[0266] L by N at position 9 and S by S at position 11;

[0267] L by N at position 9 and S by T at position 11;

[0268] M by N at position 21 and K by S at position 23;

[0269] M by N at position 21 and K by T at position 23;

[0270] R by N at position 22 and I by S at position 24;

[0271] R by N at position 22 and I by T at position 24;

[0272] R or K by N at position 23 and S by S at position 25;

[0273] R or K by N at position 23 and S by T at position 25;

[0274] I by N at position 24 and L by S at position 26;

[0275] I by N at position 24 and L by T at position 26;

[0276] S by N at position 25 and F by S at position 27;

[0277] S by N at position 25 and F by T at position 27;

[0278] L by N at position 26 and S by S at position 28;

[0279] L by N at position 26 and S by T at position 28;

[0280] S by N at position 28 and L by S at position 30;

[0281] S by N at position 28 and L by T at position 30;

[0282] L by N at position 30 and D by S at position 32;

[0283] L by N at position 30 and D by T at position 32;

[0284] K by N at position 31 and R by S at position 33;

[0285] K by N at position 31 and R by T at position 33;

[0286] D by N at position 32 and H by S at position 34;

[0287] D by N at position 32 and H by T at position 34;

[0288] R by N at position 33 and D by S at position 35;

[0289] R by N at position 33 and D by T at position 35;

[0290] H by N at position 34 and F by S at position 36;

[0291] H by N at position 34 and F by T at position 36;

[0292] D by N at position 35 and G by S at position 37;

[0293] D by N at position 35 and G by T at position 37;

[0294] F by N at position 36 and F by S at position 38;

[0295] F by N at position 36 and F by T at position 38;

[0296] G by N at position 37 and P by S at position 39;

[0297] G by N at position 37 and P by T at position 39;

[0298] F by N at position 38 and Q by S at position 40;

[0299] F by N at position 38 and Q by T at position 40;

[0300] P by N at position 39 and E by S at position 41;

[0301] P by N at position 39 and E by T at position 41;

[0302] Q by N at position 40 and E by S at position 42;

[0303] Q by N at position 40 and E by T at position 42;

[0304] E by N at position 41 and F by S at position 43;

[0305] E by N at position 41 and F by T at position 43;

[0306] E by N at position 42 and G by S at position 44;

[0307] E by N at position 42 and G by T at position 44;

[0308] F by N at position 43 and N by S at position 45;

[0309] F by N at position 43 and N by T at position 45;

[0310] G by N at position 44 and Q by S at position 46;

[0311] G by N at position 44 and Q by T at position 46;

[0312] N by N at position 45 and F by S at position 47;

[0313] N by N at position 45 and F by T at position 47;

[0314] Q by N at position 46 and Q by S at position 48;

[0315] Q by N at position 46 and Q by T at position 48;

[0316] F by N at position 47 and K by S at position 49;

[0317] F by N at position 47 and K by T at position 49;

[0318] Q by N at position 48 and A by S at position 50;

[0319] Q by N at position 48 and A by T at position 50;

[0320] K by N at position 49 and E by S at position 51;

[0321] K by N at position 49 and E by T at position 51;

[0322] A by N at position 50 and T by S at position 52;

[0323] A by N at position 50 and T by T at position 52;

[0324] S by N at position 68 and K by S at position 70;

[0325] S by N at position 68 and K by T at position 70;

[0326] K by N at position 70 and S by S at position 72;

[0327] K by N at position 70 and S by T at position 72;

[0328] A by N at position 75 and D by S at position 77;

[0329] A by N at position 75 and D by T at position 77;

[0330] D by N at position 77 and T by S at position 79;

[0331] D by N at position 77 and T by T at position 79;

[0332] I by N at position 100 and G by S at position 102;

[0333] I by N at position 100 and G by T at position 102;

[0334] Q by N at position 101 and V by S at position 103;

[0335] Q by N at position 101 and V by T at position 103;

[0336] G by N at position 102 and G by S at position 104;

[0337] G by N at position 102 and G by T at position 104;

[0338] V by N at position 103 and V by S at position 105;

[0339] V by N at position 103 and V by T at position 105;

[0340] G by N at position 104 and T by S at position 106;

[0341] G by N at position 104 and T by T at position 106;

[0342] V by N at position 105 and E by S at position 107;

[0343] V by N at position 105 and E by T at position 107;

[0344] T by N at position 106 and T by S at position 108;

[0345] T by N at position 106 and T by T at position 108;

[0346] E by N at position 107 and P by S at position 109;

[0347] E by N at position 107 and P by T at position 109;

[0348] T by N at position 108 and I by S at position 110;

[0349] T by N at position 108 and I by T at position 110;

[0350] K by N at position 134 and S by S at position 136;

[0351] K by N at position 134 and S by T at position 136;

[0352] S by N at position 154 and N by S at position 156;

[0353] S by N at position 154 and N by T at position 156;

[0354] T by N at position 155 and L by S at position 157;

[0355] T by N at position 155 and L by T at position 157;

[0356] N by N at position 156 and Q by S at position 158;

[0357] N by N at position 156 and Q by T at position 158;

[0358] L by N at position 157 and E by S at position 159;

[0359] L by N at position 157 and E by T at position 159;

[0360] Q by N at position 158 and S by S at position 160;

[0361] Q by N at position 158 and E by T at position 160;

[0362] E by N at position 159 and L by S at position 161;

[0363] B by N at position 159 and L by T at position 161;

[0364] E by N at position 160 and R by S at position 162;

[0365] E by N at position 160 and R by T at position 162;

[0366] L by N at position 161 and S by S at position 163;

[0367] L by N at position 161 and S by T at position 163;

[0368] R by N at position 162 and K by S at position 164;

[0369] R by N at position 162 and K by T at position 164;

[0370] S by N at position 163 and K by S at position 165; and

[0371] S by N at position 163 and E by T at position 165, wherein residue 1 corresponds to residue 1 of the mature IFN-α2a depicted in FIG. 1, or IFN-α2b depicted in FIG. 2; and further comprises an amino acid sequence that differs from the amino acid sequence of the parent polypeptide to the extent that the variant comprises one or more glycosylation sites not found in the parent polypeptide.

[0372] In another aspect, the parent polypeptide is IFN-α2a or IFN-α2b, and the known protease-resistant or protease-resistant, hyperglycosylated polypeptide variant comprises one or more sets of dual-amino acid replacements in the IFN-α2a amino acid sequence depicted in FIG. 1, or in the IFN-α2b amino acid sequence depicted in FIG. 2, corresponding to:

[0373] Q by N at position 5 and H by S at position 7;

[0374] P by N at position 39 and E by S at position 41;

[0375] P by N at position 39 and E by T at position 41;

[0376] Q by N at position 40 and E by S at position 42;

[0377] Q by N at position 40 and E by T at position 42;

[0378] E by N at position 41 and F by S at position 43;

[0379] E by N at position 41 and F by T at position 43;

[0380] F by N at position 43 and N by S at position 45;

[0381] G by N at position 44 and Q by T at position 46;

[0382] N by N at position 45 and F by S at position 47;

[0383] N by N at position 45 and F by T at position 47;

[0384] Q by N at position 46 and Q by S at position 48;

[0385] F by N at position 47 and K by S at position 49;

[0386] F by N at position 47 and K by T at position 49;

[0387] I by N at position 100 and G by S at position 102;

[0388] I by N at position 100 and G by T at position 102;

[0389] V by N at position 105 and E by S at position 107;

[0390] V by N at position 105 and E by T at position 107;

[0391] T by N at position 106 and T by S at position 108;

[0392] T by N at position 106 and T by T at position 108;

[0393] E by N at position 107 and P by S at position 109;

[0394] E by N at position 107 and P by T at position 109;

[0395] L by N at position 157 and E by S at position 159;

[0396] L by N at position 157 and E by T at position 159;

[0397] E by N at position 159 and L by S at position 161; and

[0398] E by N at position 159 and L by T at position 161, wherein residue 1 corresponds to residue 1 of the mature IFN-α2a depicted in FIG. 1, or IFN-α2b depicted in FIG. 2; and further comprises an amino acid sequence that differs from the amino acid sequence of the parent polypeptide to the extent that the variant comprises one or more glycosylation sites not found in the parent polypeptide.

[0399] In some embodiments, the known protease-resistant or protease-resistant, hyperglycosylated cytokine variant is an IFN-α2b, IFN-α2a, or an IFN-2c variant comprising one or more single amino acid replacements corresponding to the replacement of: N by D at position 45; D by G at position 94; G by R at position 102; A by G at position 139; or any combination thereof, where the amino acid numbering is as set forth in FIG. 1.

[0400] In some embodiments, a known protease-resistant or protease-resistant, hyperglycosylated cytokine variant is an IFN-α2b, IFN-α2a, or an IFN-2c variant comprising one or more single amino acid replacements in any of SEQ ID Nos. 1, 182, 185 or 232 (e.g., in any of the sequences set forth in FIGS. 2, 1, 11, and 9, respectively) corresponding to the replacement: L by V at position 3; L by I at position 3; P by S at position 4; P by S at position 4; P by A at position 4; R by H at position 12; R by Q at position 12; R by H at position 13; R by Q at position 13; M by V at position 16; M by I at position 16; R by H at position 22; R by Q at position 22; R or K by H at position 23; R or K by Q at position 23; F by I at position 27; F by V at position 27; L by V at position 30; L by I at position 30; K by Q at position 31; K by T at position 31; R by H at position 33; R by Q at position 33; E by Q at position 41; E by H at position 41; K by Q at position 49; K by T at position 49; E by Q at position 58; E by H at position 58; K by Q at position 70; K by T at position 70; E by Q at position 78; E by H at position 78; K by Q at position 83; K by T at position 83; Y by H at position 89; Y by I at position 89; E by Q at position 96; E by H at position 96; E by Q at position 107; E by H at position 107; P by S at position 109; P by A at position 109; L by V at position 110; L by I at position 110; M by V at position 111; M by I at position 111; E by Q at position 113; E by H at position 113; L by V at position 117; L by I at position 117; R by H at position 120; R by Q at position 120; K by Q at position 121; K by T at position 121; R by H at position 125; R by Q at position 125; L by V at position 128; L by I at position 128; K by Q at position 131; K by T at position 131; E by Q at position 132; E by H at position 132; K by Q at position 133; K by T at position 133; K by Q at position 134; K by T at position 134; Y by H at position 135; Y by I at position 135; P by S at position 137; P by A at position 137; M by V at position 148; M by I at position 148; R by H at position 149; R by Q at position 149; E by Q at position 159; E by H at position 159; L by V at position 161; L by I at position 161; R by H at position 162; R by Q at position 162; K by Q at position 164; K by T at position 164; E by Q at position 165; or E by H at position 165; or any combination thereof, wherein residue 1 corresponds to residue 1 of the mature IFN-α2b or IFN-α2a cytokine set forth in SEQ ID NOS:1 or 182 (or as set forth in FIGS. 2 and 1, respectively); and further comprising an amino acid sequence that differs from the amino acid sequence of the parent polypeptide to the extent that the variant comprises one or more glycosylation sites not found in the parent polypeptide.

[0401] In some embodiments, the known protease-resistant or protease-resistant, hyperglycosylated cytokine variant is an IFN-α2b, IFN-α2a, or an IFN-2c variant comprising one or more single amino acid replacements in any of SEQ ID Nos. 1, 182, 185 or 232 (e.g., in any of the sequences set forth in FIGS. 2, 1, 11, and 9, respectively) corresponding to the replacement: L by V at position 3; L by I at position 3; P by S at position 4; P by A at position 4; R by H at position 12; R by Q at position 12; R by H at position 13; R by Q at position 13; M by V at position 16; M by I at position 16; R by H at position 22; R by Q at position 22; R or K by H at position 23; R or K by Q at position 23; F by I at position 27; F by V at position 27; L by V at position 30; L by I at position 30; K by Q at position 31; K by T at position 31; R by H at position 33; R by Q at position 33; E by Q at position 41; E by H at position 41; K by Q at position 49; K by T at position 49; E by Q at position 58; E by H at position 58; K by Q at position 70; K by T at position 70; E by Q at position 78; E by H at position 78; K by Q at position 83; K by T at position 83; Y by H at position 89; Y by I at position 89; E by Q at position 96; E by H at position 96; E by Q at position 107; E by H at position 107; P by S at position 109; P by A at position 109; L by V at position 110; L by I at position 110; M by V at position 111; M by I at position 111; E by Q at position 113; E by H at position 113; L by V at position 117; L by I at position 117; R by H at position 120; R by Q at position 120; K by Q at position 121; K by T at position 121; R by H at position 125; R by Q at position 125; L by V at position 128; L by I at position 128; K by Q at position 131; K by T at position 131; E by Q at position 132; E by H at position 132; K by Q at position 133; K by T at position 133; K by Q at position 134; K by T at position 134; Y by H at position 135; Y by I at position 135; P by S at position 137; P by A at position 137; M by V at position 148; M by I at position 148; R by H at position 149; R by Q at position 149; E by Q at position 159; E by H at position 159; L by V at position 161; L by I at position 161; R by H at position 162; R by Q at position 162; K by Q at position 164; K by T at position 164; E by Q at position 165; E by H at position 165; N by D at position 45; D by G at position 94; G by R at position 102; or A by G at position 139; or any combination thereof, wherein residue 1 corresponds to residue 1 of the mature IFN-α2b or IFN-α2a cytokine set forth in SEQ ID No. 1 or 182; and further comprising an amino acid sequence that differs from the amino acid sequence of the parent polypeptide to the extent that the variant comprises one or more glycosylation sites not found in the parent polypeptide.

[0402] In some embodiments, any of the above-described protease-resistant or protease-resistant, hyperglycosylated IFN-α2a variants is an [D99N]IFN-α2a glycopeptide, where the [D99N]IFN-α2a glycopeptide is a variant of IFN-α2a having (a) an asparagine residue in place of the native aspartic acid residue at amino acid position 99 in the amino acid sequence of IFN-α2a (where the amino acid position is as set forth in FIG. 24; and corresponds to D71 of the sequence set forth in FIG. 1); and (b) a carbohydrate moiety covalently attached to the R-group of said asparagine residue. In some embodiments, the IFN-α2a sequence has a lysine residue in place of the arginine residue at amino acid position 50 in the IFN-α2b sequence shown in FIG. 24 (corresponding to amino acid position 23 of the IFN-α2b sequence shown in FIG. 2).

[0403] In some embodiments, any of the above-described protease-resistant or protease-resistant, hyperglycosylated IFN-α2a variants is an [D99N, D105N]IFN-α2a glycopeptide, where the [D99N, D105N]IFN-α2a glycopeptide is a variant of IFN-α2a having (a) an asparagine residue in place of the native aspartic acid residue at each of amino acid positions 99 and 105 in the amino acid sequence of IFN-α2a (where the amino acid positions are as set forth in FIG. 24; and where D99 and D105 in FIG. 24 correspond to D71 and D77, respectively, in FIGS. 1 and 2); and (b) a carbohydrate moiety covalently attached to the R-group of each of said asparagine residues. In some embodiments, the IFN-α2a sequence has a lysine residue in place of the arginine residue at amino acid position 50 in the IFN-α2b sequence shown in FIG. 24 (corresponding to Arg 23 in the IFN-α2b sequence shown in FIG. 2).

[0404] In some embodiments, any of the above-described protease-resistant or protease-resistant, hyperglycosylated IFN-α2b variants is an [D99N]IFN-α2b glycopeptide, where the [D99N]IFN-α2b glycopeptide is a variant of IFN-α2b having (a) an asparagine residue in place of the native aspartic acid residue at amino acid position 99 in the amino acid sequence of IFN-α2b depicted in FIG. 24 (where the amino acid position is as set forth in FIG. 24; and where D99 in FIG. 24 corresponds to D71 in FIGS. 1 and 2); and (b) a carbohydrate moiety covalently attached to the R-group of said asparagine residue.

[0405] In some embodiments, any of the above-described protease-resistant or protease-resistant, hyperglycosylated IFN-α2b variants is an [D99N, D105N]IFN-α2b glycopeptide, where the [D99N, D105N]IFN-α2b glycopeptide is a variant of IFN-α2b having (a) an asparagine residue in place of the native aspartic acid residue at each of amino acid positions 99 and 105 in the amino acid sequence of IFN-α2b depicted in FIG. 24 (where the amino acid positions are as set forth in FIG. 24; and where D99 and D105 in FIG. 24 correspond to D71 and D77, respectively, in FIGS. 1 and 2); and (b) a carbohydrate moiety covalently attached to the R-group of each of said asparagine residues.

[0406] In another aspect, any of the aforementioned protease-resistant or protease-resistant, hyperglycosylated IFN-α2a or IFN-α2b polypeptide variants further comprises one or more pseudo-wild type mutations. In particular embodiments, any of the aforementioned protease-resistant or protease-resistant, hyperglycosylated IFN-α2a polypeptide variants further comprises one or more pseudo-wild type mutations at one or more of amino acid residues 9, 10, 17, 20, 24, 25, 35, 37, 41, 52, 54, 56, 57, 58, 60, 63, 64, 65, 76, 89, and 90 as depicted in FIG. 1, wherein the mutation(s) are one or more of an insertion, a deletion, and a replacement of the native amino acid residue. In other particular embodiments, any of the aforementioned protease-resistant or protease-resistant, hyperglycosylated IFN-α2b polypeptide variants further comprises one or more pseudo-wild type mutations at one or more of amino acid residues 9, 10, 17, 20, 24, 25, 35, 37, 41, 52, 54, 56, 57, 58, 60, 63, 64, 65, 76, 89, and 90 as depicted in FIG. 2, wherein the mutation(s) are one or more of an insertion, a deletion, and a replacement of the native amino acid residue.

[0407] Exemplary pseudo-wild type replacements are one or more mutations in the IFN-α2a amino acid sequence depicted in FIG. 1, or the IFN-α2b amino acid sequence depicted in FIG. 2, corresponding to: P by A at position 4; Q by A at position 5, T by A at position 6; L by A at position 9, LG by A at position 10; L by A at position 17, Q by A at position 20; I by A at position 24, S by A at position 25; D by A at position 35, G by A at position 37; G by A at position 39; E by A at position 41; E by A at position 42 E by A at position 51; T by A at position 52, P by A at position 54; V by A at position 55 L by A at position 56; H by A at position 57, E by A at position 58; I by A at position 60, I by A at position 63; F by A at position 64, N by A at position 65; W by A at position 76, D by A at position 77; E by A at position 78 L by A at position 81; Y by A at position 85 Y by A at position 89; Q by A at position 90 G by A at position 104; L by A at position 110 S by A at position 115 and E by A at position 146.

[0408] In another aspect, any of the aforementioned protease-resistant or protease-resistant, hyperglycosylated IFN-α2a or IFN-α2b polypeptide variants further comprises one or more pseudo-wild type mutations. In particular embodiments, any of the aforementioned protease-resistant IFN-α2a polypeptide variants further comprises one or more pseudo-wild type mutations at one or more of amino acid residues 4, 5, 6, 9, 10, 17, 20, 24, 25, 35, 37, 39, 41, 42, 51, 52, 54, 56, 57, 58, 60, 63, 64, 65, 76, 77, 78, 81, 85, 89, 90, 104, 110, 115 and 146 as depicted in FIG. 1, wherein the mutation(s) are one or more of an insertion, a deletion, and a replacement of the native amino acid residue. In other particular embodiments, any of the aforementioned protease-resistant or protease-resistant, hyperglycosylated IFN-α2b polypeptide variants further comprises one or more pseudo-wild type mutations at one or more of amino acid residues 4, 5, 6, 9, 10, 17, 20, 24, 25, 35, 37, 39, 41, 42, 51, 52, 54, 56, 57, 58, 60, 63, 64, 65, 76, 77, 78, 81, 85, 89, 90, 104, 110, 115 and 146 as depicted in FIG. 2, wherein the mutation(s) are one or more of an insertion, a deletion, and a replacement of the native amino acid residue.

[0409] Exemplary pseudo-wild type replacements are one or more mutations in the IFN-α2a amino acid sequence depicted in FIG. 1, or the IFN-α2b amino acid sequence depicted in FIG. 2, corresponding to: P by A at position 4; Q by A at position 5; T by A at position 6; L by A at position 9; LG by A at position 10; L by A at position 17; Q by A at position 20; I by A at position 24; S by A at position 25; D by A at position 35; G by A at position 37; G by A at position 39; E by A at position 41; E by A at position 42; E by A at position 51; T by A at position 52; P by A at position 54; V by A at position 55; L by A at position 56; H by A at position 57; E by A at position 58; I by A at position 60; I by A at position 63; F by A at position 64; N by A at position 65; W by A at position 76; D by A at position 77; E by A at position 78; L by A at position 81; Y by A at position 85; Y by A at position 89, Q by A at position 90; G by A at position 104; L by A at position 110; S by A at position 115 and E by A at position 146.

[0410] In some embodiments, the known protease-resistant or protease-resistant, hyperglycosylated polypeptide variant is a variant of a parent cytokine that exhibits anti-viral activity. In some embodiments, the known protease-resistant or protease-resistant, hyperglycosylated anti-viral cytokine (e.g., a protease-resistant or protease-resistant, hyperglycosylated variant of IFN-α2a polypeptide, an IFN-α2b polypeptide, an IFN-γ polypeptide) exhibits at least about 10%, at least about 20%, at least about 30%, at least about 40%, at least about 50%, at least about 60%, at,least about 70%, at least about 80%, at least about 90%, or up to about 100% retention of the antiviral activity when compared to the corresponding unmodified (parent) cytokine (e.g., when compared to the parent IFN-α2a polypeptide, an IFN-α2b polypeptide, or IFN-γ polypeptide).

[0411] Antiviral activity is readily detected using any known assay. For example, the antiviral activity of an IFN-α2a polypeptide is tested in vitro in the following manner. An interferon-sensitive HeLa cell line (e.g., ATCC accession no. CCL-2) is contacted in vitro with an IFN-α2a polypeptide; subsequently, the cells are contacted with encephalomyocarditis virus (EMCV). Antiviral activity is detected by assessing cytopathic effect (CPE); or by measuring the amount of EMCV mRNA in extracts of infected cells using reverse transcription-polymerase chain reaction (RT-PCR).

[0412] The assay can be quantitative. For example, in some embodiments, the antiviral activity is assessed by reverse transcription quantitative polymerase chain reaction (RT-qPCR). For example, confluent cells (e.g., ATCC accession no. CCL-2) are plated at a density of 2×10⁴ cells/well in a suitable culture medium (e.g., DMEM 5% SVF medium). Cells are then incubated with IFN-α2b at a concentration of 500 U/ml for 24 hours at 37° C. After the 24-hour incubation with IFN-α2b, the cells are challenged with EMCV (MOI=100). After incubation with virus for 16 hours, or when virus-induce CPE is near maximum in control cells not treated with IFN-α2b, the number of EMCV particles in each well is determined by RT-PCR quantification of EMCV mRNA in cell lysates. RNA is purified from the cell lysates. See, e.g., U.S. Patent Publication No. 2004/0132977.

[0413] In some embodiments, the known protease-resistant or protease-resistant, hyperglycosylated polypeptide variant is effective in reducing viral load in an individual. Viral load can be measured by measuring the titer or level of virus in serum. These methods include, but are not limited to, a quantitative polymerase chain reaction (PCR) and a branched DNA (bDNA) test. Quantitative assays for measuring the viral load (titer) of HCV RNA have been developed. Many such assays are available commercially, including a quantitative reverse transcription PCR (RT-PCR) (Amplicor HCV Monitor™, Roche Molecular Systems, New Jersey); and a branched DNA (deoxyribonucleic acid) signal amplification assay (Quantiplex™ HCV RNA Assay (bDNA), Chiron Corp., Emeryville, Calif.). See, e.g., Gretch et al. (1995) Ann. Intern. Med. 123:321-329. Also of interest is a nucleic acid test (NAT), developed by Gen-Probe Inc. (San Diego) and Chiron Corporation, and sold by Chiron Corporation under the trade name Procleix®, which NAT simultaneously tests for the presence of HIV-1 and HCV. See, e.g., Vargo et al. (2002) Transfusion 42:876-885.

[0414] In some embodiments, the known protease-resistant or protease-resistant, hyperglycosylated anti-viral cytokine variant (e.g., a protease-resistant variant of IFN-α2a polypeptide, an IFN-α2b polypeptide, an IFN-γ polypeptide) exhibits retention of anti-proliferative activity compared to the unmodified (parent) cytokine protein therapeutic.

[0415] Anti-proliferative activity can be measured using any known method. For example, anti-proliferative activity is assessed by measuring cell proliferation in the presence of the protease-resistant anti-viral cytokine variant, where cell proliferation is measured using any convenient assay. Cell proliferation is measured using assays based on ³H-thymidine incorporation; incorporation of the thymidine analog BrdU; cleavage of a tetrazolium salt; DNA-dye complex formation; and the like. One non-limiting example of a suitable assay for cell proliferation is The CellTiter 96® AQueous Non-Radioactive Cell Proliferation Assay (Promega). The CellTiter 96® Aqueous assay is a colorimetric method for determining the number of viable cells in proliferation or chemosensitivity assays. The CellTiter 96® AQueous Assay is composed of solutions of a tetrazolium compound (3-(4,5-dimethylthiazol-2-yl)-5-(3-carboxymethoxyphenyl)-2-(4-sulfophenyl)-2H-tetrazolium, inner salt; MTS) and an electron coupling reagent (phenazine methosulfate; PMS). MTS is bioreduced by cells into a formazan product that is soluble in tissue culture medium. The absorbance of the formazan at 490 mn can be measured directly from 96 well assay plates without additional processing. The conversion of MTS into aqueous, soluble formazan is accomplished by dehydrogenase enzymes found in metabolically active cells. The quantity of formazan product as measured by the amount of 490 nm absorbance is directly proportional to the number of living cells in culture.

[0416] In some embodiments, the known protease-resistant or protease-resistant, hyperglycosylated anti-viral cytokine variant (e.g., a hyperglycosylated, protease-resistant variant of IFN-α2a polypeptide, an IFN-α2b polypeptide, an IFN-γ polypeptide) binds to an interferon receptor, but exhibits decreased antiviral activity compared to the unmodified (parent) cytokine protein therapeutic, or exhibits decreased anti-proliferative activity, compared to the parent cytokine protein therapeutic.

[0417] In some embodiments, the known protease-resistant or protease-resistant, hyperglycosylated anti-viral cytokine variant (e.g., a protease-resistant variant of IFN-α2a polypeptide, an IFN-α2b polypeptide, an IFN-γ polypeptide) comprises two or more mutations, e.g., the protease-resistant anti-viral cytokine variant comprises two, three, four, five, six, seven, eight, nine, or ten single amino acid changes compared to the corresponding parent cytokine. In some embodiments, the known protease-resistant or protease-resistant, hyperglycosylated anti-viral cytokine variant is a variant of an IFN-α2a polypeptide. In other embodiments, the known protease-resistant or protease-resistant, hyperglycosylated anti-viral cytokine variant is a variant of an IFN-α2a polypeptide. In other embodiments, the known protease-resistant or protease-resistant, hyperglycosylated anti-viral cytokine variant is a variant of an IFN-γ polypeptide.

[0418] In some embodiments, the known protease-resistant or protease-resistant, hyperglycosylated polypeptide cytokine variant comprises an amino acid sequence as set forth in any one of SEQ ID NOs:2-181, where the arginine at position 23 is replaced with a lysine; and further comprises an amino acid sequence that differs from the amino acid sequence of the parent polypeptide to the extent that the variant comprises one or more glycosylation sites not found in the parent polypeptide. In other embodiments, the known protease-resistant or protease-resistant, hyperglycosylated polypeptide cytokine variant exhibits greater resistance to proteolysis compared to the unmodified (parent) cytokine, and the protease-resistant or protease-resistant, hyperglycosylated polypeptide cytokine variant comprises one or more amino acid replacements at one or more positions on the cytokine, corresponding to a structurally-related modified amino acid position within the 3-D structure of a IFN-α2a polypeptide, a IFN-α2b polypeptide, a IFN-α2c polypeptide, or a consensus IFN-α as depicted in FIG. 9. In some embodiments, resistance to proteolysis is measured by contacting the polypeptide variant in vitro, as described above. In other embodiments, resistance to proteolysis is measured by contacting the polypeptide variant in vitro or in vivo with blood (e.g., human blood). In other embodiments, resistance to proteolysis is measured by contacting the polypeptide variant in vitro with serum (e.g., human serum), as described above.

[0419] In some embodiments, any of the above-described protease-resistant or protease-resistant, hyperglycosylated polypeptide IFN-α2b variants has increased stability compared to the unmodified (parent) cytokine, where the stability is assessed by measuring residual biological activity to either inhibit viral replication or to inhibit cell proliferation in appropriate cells, after incubation with either a mixture of proteases, individual proteases, blood lysate, or serum, as described above.

[0420] In some embodiments, any of the above-described protease-resistant or protease-resistant, hyperglycosylated polypeptide IFN-α2b variants has increased biological activity compared to the unmodified (parent) cytokine, where the activity is assessed by the capacity to either inhibit viral replication in appropriate cells, or to inhibit cell proliferation in appropriate cells, after incubation with either a mixture of proteases, individual proteases, blood lysate, or serum, as described above.

[0421] In some embodiments, any of the above-described protease-resistant or protease-resistant, hyperglycosylated polypeptide IFN-α2a variants has increased stability compared to the unmodified (parent) cytokine, where the stability is assessed by measuring residual biological activity to either inhibit viral replication or to inhibit cell proliferation in appropriate cells, after incubation with either a mixture of proteases, individual proteases, blood lysate, or serum, as described above.

[0422] In some embodiments, any of the above-described protease-resistant or protease-resistant, hyperglycosylated polypeptide IF-N-α2a variants has increased biological activity compared to the unmodified (parent) cytokine, where the activity is assessed by the capacity to either inhibit viral replication in appropriate cells, or to inhibit cell proliferation in appropriate cells, after incubation with either a mixture of proteases, individual proteases, blood lysate, or serum, as described above.

[0423] In some embodiments, any of the above-described protease-resistant or protease-resistant, hyperglycosylated polypeptide IFN-α2c variants has increased stability compared to the unmodified (parent) cytokine, where the stability is assessed by measuring residual biological activity after incubation with either a mixture of proteases, individual proteases, blood lysate, or serum, as described above.

[0424] In some embodiments, any of the above-described protease-resistant or protease-resistant, hyperglycosylated polypeptide IFN-α2c variants has increased biological activity compared to the unmodified (parent) cytokine, after incubation with either a mixture of proteases, individual proteases, blood lysate, or serum, as described above.

3-D Structural Homologs

[0425] In some embodiments, a hyperglycosylated, protease-resistant polypeptide variant is a modified cytokine. In some embodiments, a hyperglycosylated, protease-resistant cytokine variant is a modified interferon. In some embodiments, any of the above-described hyperglycosylated, protease-resistant cytokine variants that is a structural homolog of IFN-α2b comprises one or more amino acid replacements at positions corresponding to the 3-dimensional-structurally-similar modified positions within the 3-D structure of the modified IFN-α2b, IFN-α2a, IFN-α2c, or a consensus. IFN-α as depicted in FIG. 9. In some embodiments, the structural homolog has increased resistance to proteolysis compared to its unmodified (parent) cytokine counterpart, where the resistance to proteolysis is measured by mixture with a protease in vitro, incubation with blood or incubation with serum, as described above.

[0426] In some embodiments, the hyperglycosylated, protease-resistant cytokine variant is a structural homolog of an IFN-α cytokine. In some embodiments, the hyperglycosylated, protease-resistant IFN-α variant is a structural homolog of IFN-α2b. In some of these embodiments, the IFN-α cytokine is selected from variants of IFN-α2a, IFN-α2c, IFN-αc, IFN-αd, IFN-α5, IFN-α6, IFN-α4, IFN-α4b, IFN-αI, IFN-αJ, IFN-αH, IFN-αF, IFN-α8, and a consensus IFN-α. Thus, in some embodiments, the known hyperglycosylated, protease-resistant IFN-α variant comprises one or more amino acid replacements at one or more target positions in the amino acid sequence of IFN-α2a, IFN-α2c, IFN-αc, IFN-αd, IFN-α5, IFN-α6, IFN-α4, IFN-α4b, IFN-αI, IFN-αJ, IFN-αH, IFN-αF, IFN-α8, or a consensus IFN-α, corresponding to a structurally-related modified amino acid position within the 3-dimensional structure of the IFN-α2b modified proteins described above. The replacements lead to greater resistance to proteases, as assessed by incubation with a protease or a with a blood lysate or by incubation with serum, compared to the unmodified (parent) IFN-α, e.g., compared to a parent IFN-α2a, or IFN-α2b polypeptide.

[0427] In some embodiments, the hyperglycosylated, protease-resistant IFN-α variant is a modified IFN-α2a cytokine, comprising one or more amino acid replacements at one or more target positions in the amino acid sequence set forth in FIG. 1 (or SEQ ID NO:182) corresponding to a structurally-related modified amino acid position within the 3-dimensional structure of an above-described IFN-α2b variant, where the replacement(s) lead to greater resistance to proteases, as assessed by incubation with a protease or with a blood lysate or by incubation with serum (as described above), compared to the unmodified IFN-α2a.

[0428] In some embodiments, the hyperglycosylated, protease-resistant IFN-α2a variant comprises one or more single amino acid replacements at one or more target positions in SEQ ID NO: 182 (or the amino acid sequence set forth in FIG. 1), corresponding to any of amino acid positions: 41, 58, 78, 107, 117, 125, 133 and 159; and further comprises an amino acid sequence that differs from the amino acid sequence of the parent polypeptide to the extent that the variant comprises one or more glycosylation sites not found in the parent polypeptide.

[0429] In other embodiments, the hyperglycosylated, protease-resistant IFN-α variant is a modified IFN-αc cytokine, comprising one or more amino acid replacements at one or more target positions in SEQ ID NO:183 (as set forth in FIG. 10) corresponding to a structurally-related modified amino acid position within the 3-dimensional structure of an above-described IFN-α2b polypeptide variant, where the replacement(s) lead to greater resistance to proteases, as assessed by incubation with a protease or with a blood lysate or by incubation with serum (as described above), compared to the unmodified IFN-αc. In some of these embodiments, the modified IFN-αc is selected from among proteins comprising one or more single amino acid replacements at one or more target positions in SEQ ID NO: 183 (as set forth in FIG. 10), corresponding to any of amino acid positions: 41, 59, 79, 108, 118, 126, 134 and 160; where the variant further comprises an amino acid sequence that differs from the amino acid sequence of the parent polypeptide to the extent that the variant comprises one or more glycosylation sites not found in the parent polypeptide.

[0430] In other embodiments, the hyperglycosylated, protease-resistant IFN-α variant is a modified IFN-α2c cytokine, comprising one or more amino acid replacements at one or more target positions in SEQ ID NO:185 (as set forth in FIG. 11) corresponding to a structurally-related modified amino acid position within the 3-dimensional structure of an above-described IFN-α2b polypeptide variant, where the replacement(s) lead to greater resistance to proteases, as assessed by incubation with a protease or with a blood lysate or by incubation with serum (as described above), compared to the unmodified IFN-α2c. In some of these embodiments, the modified IFN-α2c is selected from among proteins comprising one or more single amino acid replacements at one or more target positions in SEQ ID NO: 185 (as set forth in FIG. 11), corresponding to any of amino acid positions: 41, 58, 78, 107, 117, 125, 133 and 159, or to any of amino acid positions: 27, 33, 41, 59, 79, 90, 108, 110, 111, 112, 114, 118, 122, 126, 134, and 160; where the variant further comprises an amino acid sequence that differs from the amino acid sequence of the parent polypeptide to the extent that the variant comprises one or more glycosylation sites not found in the parent polypeptide.

[0431] In some embodiments, any of the above-described hyperglycosylated, protease-resistant IFN-α2c variants has increased stability compared to the unmodified (parent) cytokine, where the stability is assessed by measuring residual biological activity after incubation with either a mixture of proteases, individual proteases, blood lysate, or serum, as described above. In other embodiments, any of the above-described hyperglycosylated, protease-resistant IFN-α2c variants has increased biological activity compared to the unmodified (parent) cytokine, after incubation with either a mixture of proteases, individual proteases, blood lysate, or serum, as described above.

[0432] In other embodiments, the hyperglycosylated, protease-resistant IFN-α variant is a modified IFN-αd cytokine, comprising one or more amino acid replacements at one or more target positions in SEQ ID NO:186 (as set forth in FIG. 12) corresponding to a structurally-related modified amino acid position within the 3-dimensional structure of an above-described IFN-α2b polypeptide variant, where the replacement(s) lead to greater resistance to proteases, as assessed by incubation with a protease or with a blood lysate or by incubation with serum (as described above), compared to the unmodified IFN-αd. In some of these embodiments, the modified IFN-αd is selected from among proteins comprising one or more single amino acid replacements at one or more target positions in SEQ ID NO: 186 (as set forth in FIG. 12), corresponding to any of amino acid positions: 41, 59, 79, 108, 118, 126, 134 and 160, or to any of amino acid positions: 27, 33, 41, 59, 79, 90, 108, 110, 111, 112, 114, 118, 122, 126, 134, and 160; where the variant further comprises an amino acid sequence that differs from the amino acid sequence of the parent polypeptide to the extent that the variant comprises one or more glycosylation sites not found in the parent polypeptide.

[0433] In some embodiments, any of the above-described hyperglycosylated, protease-resistant IFN-αd variants has increased stability compared to the unmodified (parent) cytokine, where the stability is assessed by measuring residual biological activity after incubation with either a mixture of proteases, individual proteases, blood lysate, or serum, as described above. In other embodiments, any of the above-described hyperglycosylated, protease-resistant IFN-αd variants has increased biological activity compared to the unmodified (parent) cytokine, after incubation with either a mixture of proteases, individual proteases, blood lysate, or serum, as described above.

[0434] In other embodiments, the hyperglycosylated, protease-resistant IFN-α variant is a modified IFN-α5 cytokine, comprising one or more amino acid replacements at one or more target positions in SEQ ID NO:187 (as set forth in FIG. 13) corresponding to a structurally-related modified amino acid position within the 3-dimensional structure of an above-described IFN-α2b polypeptide variant, where the replacement(s) lead to greater resistance to proteases, as assessed by incubation with a protease or with a blood lysate or by incubation with serum (as described above), compared to the unmodified IFN-α5. In some of these embodiments, the modified IFN-α5 is selected from among proteins comprising one or more single amino acid replacements at one or more target positions in SEQ ID NO: 187 (as set forth in FIG. 13), corresponding to any of amino acid positions: 41, 59, 79, 108, 118, 126, 134 and 160, or to any of amino acid positions: 27, 33, 41, 59, 79, 90, 108, 110, 111, 112, 114, 118, 122, 126, 134, and 160; where the variant further comprises an amino acid sequence that differs from the amino acid sequence of the parent polypeptide to the extent that the variant comprises one or more glycosylation sites not found in the parent polypeptide.

[0435] In some embodiments, any of the above-described hyperglycosylated, protease-resistant IFN-α5 variants has increased stability compared to the unmodified (parent) cytokine, where the stability is assessed by measuring residual biological activity after incubation with either a mixture of proteases, individual proteases, blood lysate, or serum, as described above. In other embodiments, any of the above-described hyperglycosylated, protease-resistant IFN-α5 variants has increased biological activity compared to the unmodified (parent) cytokine, after incubation with either a mixture of proteases, individual proteases, blood lysate, or serum, as described above.

[0436] In other embodiments, the hyperglycosylated, protease-resistant IFN-α variant is a modified IFN-α6 cytokine, comprising one or more amino acid replacements at one or more target positions in SEQ ID NO:188 (as set forth in FIG. 14) corresponding to a structurally-related modified amino acid position within the 3-dimensional structure of an above-described IFN-α2b polypeptide variant, where the replacement(s) lead to greater resistance to proteases, as assessed by incubation with a protease or with a blood lysate or by incubation with serum (as described above), compared to the unmodified IFN-α6. In some of these embodiments, the modified IFN-α6 is selected from among proteins comprising one or more single amino acid replacements at one or more target positions in SEQ ID NO: 188 (as set forth in FIG. 14), corresponding to any of amino acid positions: 41, 59, 79, 108, 118, 126, 134 and 160, or to any of amino acid positions: 27, 33, 41, 59, 79, 90, 108, 110, 111, 112, 114, 118, 122, 126, 134, and 160; where the variant further comprises an amino acid sequence that differs from the amino acid sequence of the parent polypeptide to the extent that the variant comprises one or more glycosylation sites not found in the parent polypeptide.

[0437] In some embodiments, any of the above-described hyperglycosylated, protease-resistant IFN-α6 variants has increased stability compared to the unmodified (parent) cytokine, where the stability is assessed by measuring residual biological activity after incubation with either a mixture of proteases, individual proteases, blood lysate, or serum, as described above. In other embodiments, any of the above-described hyperglycosylated, protease-resistant IFN-α6 variants has increased biological activity compared to the unmodified (parent) cytokine, after incubation with either a mixture of proteases, individual proteases, blood lysate, or serum, as described above.

[0438] In other embodiments, the hyperglycosylated, protease-resistant IFN-α polypeptide variant is a modified IFN-α4 cytokine, comprising one or more amino acid replacements at one or more target positions in SEQ ID NO:189 (as set forth in FIG. 15) corresponding to a structurally-related modified amino acid position within the 3-dimensional structure of an above-described IFN-α2b polypeptide variant, where the replacement(s) lead to greater resistance to proteases, as assessed by incubation with a protease or with a blood lysate or by incubation with serum (as described above), compared to the unmodified IFN-α4. In some of these embodiments, the modified IFN-α4 is selected from among proteins comprising one or more single amino acid replacements at one or more target positions in SEQ ID NO: 189 (as set forth in FIG. 15), corresponding to any of amino acid positions: 41, 59, 79, 108, 118, 126, 134 and 160, or to any of amino acid positions: 27, 33, 41, 59, 79, 90, 108, 110, 111, 112, 114, 118, 122, 126, 134, and 160; where the variant further comprises an amino acid sequence that differs from the amino acid sequence of the parent polypeptide to the extent that the variant comprises one or more glycosylation sites not found in the parent polypeptide.

[0439] In some embodiments, any of the above-described hyperglycosylated, protease-resistant IFN-α4 variants has increased stability compared to the unmodified (parent) cytokine, where the stability is assessed by measuring residual biological activity after incubation with either a mixture of proteases, individual proteases, blood lysate, or serum, as described above. In other embodiments, any of the above-described hyperglycosylated, protease-resistant IFN-α4 variants has increased biological activity compared to the unmodified (parent) cytokine, after incubation with either a mixture of proteases, individual proteases, blood lysate, or serum, as described above.

[0440] In other embodiments, the hyperglycosylated, protease-resistant IFN-α variant is a modified IFN-α4b cytokine, comprising one or more amino acid replacements at one or more target positions in SEQ ID NO:190 (as set forth in FIG. 16) corresponding to a structurally-related modified amino acid position within the 3-dimensional structure of an above-described IFN-α2b polypeptide variant, where the replacement(s) lead to greater resistance to proteases, as assessed by incubation with a protease or with a blood lysate or by incubation with serum (as described above), compared to the unmodified IFN-α4b. In some of these embodiments, the modified IFN-α4b is selected from among proteins comprising one or more single amino acid replacements at one or more target positions in SEQ ID NO: 190 (as set forth in FIG. 16), corresponding to any of amino acid positions: 41, 59, 79, 108, 118, 126, 134 and 160, or to any of amino acid positions: 27, 33, 41, 59, 79, 90, 108, 110, 111, 112, 114, 118, 122, 126, 134, and 160; where the variant further comprises an amino acid sequence that differs from the amino acid sequence of the parent polypeptide to the extent that the variant comprises one or more glycosylation sites not found in the parent polypeptide.

[0441] In some embodiments, any of the above-described hyperglycosylated, protease-resistant IFN-α4b variants has increased stability compared to the unmodified (parent) cytokine, where the stability is assessed by measuring residual biological activity after incubation with either a mixture of proteases, individual proteases, blood lysate, or serum, as described above. In other embodiments, any of the above-described hyperglycosylated, protease-resistant IFN-α4b variants has increased biological activity compared to the unmodified (parent) cytokine, after incubation with either a mixture of proteases, individual proteases, blood lysate, or serum, as described above.

[0442] In other embodiments, the hyperglycosylated, protease-resistant IFN-α variant is a modified IFN-αI cytokine, comprising one or more amino acid replacements at one or more target positions in SEQ ID NO:191 (as set forth in FIG. 17) corresponding to a structurally-related modified amino acid position within the 3-dimensional structure of an above-described IFN-α2b polypeptide variant, where the replacement(s) lead to greater resistance to proteases, as assessed by incubation with a protease or with a blood lysate or by incubation with serum (as described above), compared to the unmodified IFN-αI. In some of these embodiments, the modified IFN-αI is selected from among proteins comprising one or more single amino acid replacements at one or more target positions in SEQ ID NO: 191 (as set forth in FIG. 17), corresponding to any of amino acid positions: 41, 59, 79, 108, 118, 126, 134 and 160, or to any of amino acid positions: 27, 33, 41, 59, 79, 90, 108, 110, 111, 112, 114, 118, 122, 126, 134, and 160; where the variant further comprises an amino acid sequence that differs from the amino acid sequence of the parent polypeptide to the extent that the variant comprises one or more glycosylation sites not found in the parent polypeptide.

[0443] In some embodiments, any of the above-described hyperglycosylated, protease-resistant IFN-αI variants has increased stability compared to the unmodified (parent) cytokine, where the stability is assessed by measuring residual biological activity after incubation with either a mixture of proteases, individual proteases, blood lysate, or serum, as described above. In other embodiments, any of the above-described hyperglycosylated, protease-resistant IFN-αI variants has increased biological activity compared to the unmodified (parent) cytokine, after incubation with either a mixture of proteases, individual proteases, blood lysate, or serum, as described above.

[0444] In other embodiments, the hyperglycosylated, protease-resistant IFN-α variant is a modified IFN-αJ cytokine, comprising one or more amino acid replacements at one or more target positions in SEQ ID NO:192 (as set forth in FIG. 18) corresponding to a structurally-related modified amino acid position within the 3-dimensional structure of an above-described IFN-α2b polypeptide variant, where the replacement(s) lead to greater resistance to proteases, as assessed by incubation with a protease or with a blood lysate or by incubation with serum (as described above), compared to the unmodified IFN-αJ. In some of these embodiments, the modified IFN-αJ is selected from among proteins comprising one or more single amino acid replacements at one or more target positions in SEQ ID NO: 192 (as set forth in FIG. 18), corresponding to any of amino acid positions: 41, 59, 79, 108, 118, 126, 134 and 160, or to any of amino acid positions: 27, 33, 41, 59, 79, 90, 108, 110, 111, 112, 114, 118, 122, 126, 134, and 160; where the variant further comprises an amino acid sequence that differs from the amino acid sequence of the parent polypeptide to the extent that the variant comprises one or more glycosylation sites not found in the parent polypeptide.

[0445] In some embodiments, any of the above-described hyperglycosylated, protease-resistant IFN-αJ variants has increased stability compared to the unmodified (parent) cytokine, where the stability is assessed by measuring residual biological activity after incubation with either a mixture of proteases, individual proteases, blood lysate, or serum, as described above. In other embodiments, any of the above-described hyperglycosylated, protease-resistant IFN-αJ variants has increased biological activity compared to the unmodified (parent) cytokine, after incubation with either a mixture of proteases, individual proteases, blood lysate, or serum, as described above.

[0446] In other embodiments, the hyperglycosylated, protease-resistant IFN-α variant is a modified IFN-αH cytokine, comprising one or more amino acid replacements at one or more target positions in SEQ ID NO:193 (as set forth in FIG. 19) corresponding to a structurally-related modified amino acid position within the 3-dimensional structure of an above-described IFN-α2b polypeptide variant, where the replacement(s) lead to greater resistance to proteases, as assessed by incubation with a protease or with a blood lysate or by incubation with serum (as described above), compared to the unmodified IFN-αH. In some of these embodiments, the modified IFN-αH is selected from among proteins comprising one or more single amino acid replacements at one or more target positions in SEQ ID NO: 193 (as set forth in FIG. 19), corresponding to any of amino acid positions: 41, 59, 79, 108, 118, 126, 134 and 160, or to any of amino acid positions: 27, 33, 41, 59, 79, 90, 108, 110, 111, 112, 114, 118, 122, 126, 134, and 160; where the variant further comprises an amino acid sequence that differs from the amino acid sequence of the parent polypeptide to the extent that the variant comprises one or more glycosylation sites not found in the parent polypeptide.

[0447] In some embodiments, any of the above-described hyperglycosylated, protease-resistant IFN-αH variants has increased stability compared to the unmodified (parent) cytokine, where the stability is assessed by measuring residual biological activity after incubation with either a mixture of proteases, individual proteases, blood lysate, or serum, as described above. In other embodiments, any of the above-described hyperglycosylated, protease-resistant IFN-αH variants has increased biological activity compared to the unmodified (parent) cytokine, after incubation with either a mixture of proteases, individual proteases, blood lysate, or serum, as described above.

[0448] In other embodiments, the hyperglycosylated, protease-resistant IFN-α variant is a modified IFN-αF cytokine, comprising one or more amino acid replacements at one or more target positions in SEQ ID NO:194 (as set forth in FIG. 20) corresponding to a structurally-related modified amino acid position within the 3-dimensional structure of an above-described IFN-α2b polypeptide variant, where the replacement(s) lead to greater resistance to proteases, as assessed by incubation with a protease or with a blood lysate or by incubation with serum (as described above), compared to the unmodified IFN-αF. In some of these embodiments, the modified IFN-αF is selected from among proteins comprising one or more single amino acid replacements at one or more target positions in SEQ ID NO: 194 (as set forth in FIG. 20), corresponding to any of amino acid positions: 41, 59, 79, 108, 118, 126, 134 and 160, or to any of amino acid positions: 27, 33, 41, 59, 79, 90, 108, 110, 111, 112, 114, 118, 122, 126, 134, and 160; where the variant further comprises an amino acid sequence that differs from the amino acid sequence of the parent polypeptide to the extent that the variant comprises one or more glycosylation sites not found in the parent polypeptide.

[0449] In some embodiments, any of the above-described hyperglycosylated, protease-resistant IFN-αF variants has increased stability compared to the unmodified (parent) cytokine, where the stability is assessed by measuring residual biological activity after incubation with either a mixture of proteases, individual proteases, blood lysate, or serum, as described above. In other embodiments, any of the above-described hyperglycosylated, protease-resistant IFN-αF variants has increased biological activity compared to the unmodified (parent) cytokine, after incubation with either a mixture of proteases, individual proteases, blood lysate, or serum, as described above.

[0450] In other embodiments, the hyperglycosylated, protease-resistant IFN-α variant is a modified IFN-α8 cytokine, comprising one or more amino acid replacements at one or more target positions in SEQ ID NO:195 (as set forth in FIG. 21) corresponding to a structurally-related modified amino acid position within the 3-dimensional structure of an above-described IFN-α2b polypeptide variant, where the replacement(s) lead to greater resistance to proteases, as assessed by incubation with a protease or with a blood lysate or by incubation with serum (as described above), compared to the unmodified IFN-α8. In some of these embodiments, the modified IFN-α8 is selected from among proteins comprising one or more single amino acid replacements at one or more target positions in SEQ ID NO: 195 (as set forth in FIG. 21), corresponding to any of amino acid positions: 41, 59, 79, 108, 118, 126, 134 and 160, or to any of amino acid positions: 27, 33, 41, 59, 79, 90, 108, 110, 111, 112, 114, 118, 122, 126, 134, and 160; where the variant further comprises an amino acid sequence that differs from the amino acid sequence of the parent polypeptide to the extent that the variant comprises one or more glycosylation sites not found in the parent polypeptide.

[0451] In some embodiments, any of the above-described hyperglycosylated, protease-resistant IFN-α8 variants has increased stability compared to the unmodified (parent) cytokine, where the stability is assessed by measuring residual biological activity after incubation with either a mixture of proteases, individual proteases, blood lysate, or serum, as described above. In other embodiments, any of the above-described hyperglycosylated, protease-resistant IFN-α8 variants has increased biological activity compared to the unmodified (parent) cytokine, after incubation with either a mixture of proteases, individual proteases, blood lysate, or serum, as described above.

Consensus IFN-αPolypeptide Variants

[0452] In other embodiments, the hyperglycosylated, protease-resistant IFN-α variant is a modified consensus IFN-α cytokine, comprising one or more amino acid replacements at one or more target positions in SEQ ID NO:232 (as set forth in FIG. 9) corresponding to a structurally-related modified amino acid position within the 3-dimensional structure of an above-described IFN-α2b polypeptide variant, where the replacement(s) lead to greater resistance to proteases, as assessed by incubation with a protease or with a blood lysate or by incubation with serum (as described above), compared to the unmodified consensus IFN-α. In some of these embodiments, the modified consensus IFN-α is selected from among proteins comprising one or more single amino acid replacements at one or more target positions in SEQ ID NO: 232 (as set forth in FIG. 9), corresponding to any of amino acid positions: 42, 59, 79, 108, 118, 126, 134 and 160, or to any of amino acid positions: 27, 33, 42, 60, 80, 91, 109, 111, 112, 113, 115, 119, 123, 127, 135, and 161; where the variant further comprises an amino acid sequence that differs from the amino acid sequence of the parent polypeptide to the extent that the variant comprises one or more glycosylation sites not found in the parent polypeptide.

[0453] In some embodiments, any of the above-described consensus IFN-α variants is an [D99N]interferon alfacon-1 glycopeptide, where the [D99N]interferon alfacon-1 glycopeptide is a variant of the interferon alfacon-1 polypeptide having (a) an asparagine residue substituted for the native aspartic acid residue at amino acid position 99 in the amino acid sequence of Infergen (interferon alfacon-1) depicted in FIG. 24 (where the amino acid position is as set forth in FIG. 24; and where D99 in FIG. 24 corresponds to D72 in FIG. 9); and (b) a carbohydrate moiety covalently attached to the R-group of said asparagine residue.

[0454] In some embodiments, any of the above-described consensus IFN-α variants is an [D99N, D105N]interferon alfacon-1 glycopeptide, where the [D99N, D105 N]interferon alfacon-1 glycopeptide is a variant of the interferon alfacon-1 polypeptide having (a) an asparagine residue substituted for each of the native aspartic acid residues at amino acid positions 99 and 105 in the amino acid sequence of Infergen depicted in FIG. 24 (where the amino acid positions are as set forth in FIG. 24; and where D99 and D105 in FIG. 24 correspond to D72 and D78, respectively, in FIG. 9); and (b) a carbohydrate moiety covalently attached to the R-group of each of said asparagine residues.

[0455] In some embodiments, any of the above-described consensus IFN-α variants is an [D99N, D105N, E134N]interferon alfacon-1 glycopeptide, where the [D99N, D105N, E134N]interferon alfacon-1 glycopeptide is a variant of the interferon alfacon-1 polypeptide having (a) an asparagine residue substituted for each of the native aspartic acid, aspartic acid, and glutamic acid residues at amino acid positions 99, 105 and 134, respectively, in the amino acid sequence of Infergen depicted in FIG. 24 (where the amino acid positions are as set forth in FIG. 24; and where D99, D105, and E134 in FIG. 24 correspond to D72, D78, and E107, respectively, in FIG. 9); and (b) a carbohydrate moiety covalently attached to the R-group of each of said asparagine residues.

[0456] In some embodiments, any of the above-described consensus IFN-α variants is an [D99N, E134N]interferon alfacon-1 glycopeptide, where-the [D99N, E134N] interferon alfacon-1 glycopeptide is a variant of the interferon alfacon-1 polypeptide having (a) an asparagine residue substituted for each of the native aspartic acid and glutamic acid residues at amino acid positions 99 and 134, respectively, in the amino acid sequence of Infergen depicted in FIG. 24 (where the amino acid positions are as set forth in FIG. 24; and where D99 and E134 in FIG. 24 correspond to D72 and E107, respectively, in FIG. 9); and (b) a carbohydrate moiety covalently attached to the R-group of each of said asparagine residues.

[0457] In some embodiments, any of the above-described consensus IFN-α variants is an [D105N, E134N]interferon alfacon-1 glycopeptide, where the [D105N, E134N] interferon alfacon-1 glycopeptide is a variant of the interferon alfacon-1 polypeptide having (a) an asparagine residue substituted for each of the native aspartic acid and glutamic acid residues at amino acid positions 105 and 134, respectively, in the amino acid sequence of Infergen depicted in FIG. 24 (where the amino acid positions are as set forth in FIG. 24; and where D105 and E134 in FIG. 24 correspond to D78 and E107, respectively, in FIG. 9); and (b) a carbohydrate moiety covalently attached to the R-group of each of said asparagine residues.

[0458] In some embodiments, any of the above-described consensus IFN-α variants is an [D99N, D105N, E134T]interferon alfacon-1 glycopeptide, where the [D99N, D105N, E134T]interferon alfacon-1 glycopeptide is a variant of the interferon alfacon-1 polypeptide having (a) an asparagine residue substituted for each of the native aspartic acid residues at amino acid positions 99 and 105 in the amino acid sequence of Infergen depicted in FIG. 24 (b) a threonine residue substituted for the native glutamic acid residue at amino acid position 134 in the amino acid sequence of Infergen depicted in FIG. 24 (where the amino acid positions are as set forth in FIG. 24; and where D99, D105, and E134 in FIG. 24 correspond to D72, D78, and E107, respectively, in FIG. 9); and (c) a carbohydrate moiety covalently attached to the R-group of each of said asparagine and threonine residues.

[0459] In some embodiments, any of the above-described consensus IFN-α variants is an [D99N, E134T]interferon alfacon-1 glycopeptide, where the [D99N, E134T]interferon alfacon-1 glycopeptide is a variant of the interferon alfacon-1 polypeptide having (a) an asparagine residue substituted for the native aspartic acid residue at amino acid position 99 in the amino acid sequence of Infergen depicted in FIG. 24 (b) a threonine residue substituted for the native glutamic acid residue at amino acid position 134 in the amino acid sequence of Infergen depicted in FIG. 24 (where the amino acid positions are as set forth in FIG. 24; and where D99 and E134 in FIG. 24 correspond to D72 and E107, respectively, in FIG. 9); and (c) a carbohydrate moiety covalently attached to the R-group of each of said asparagine and threonine residues.

[0460] In some embodiments, any of the above-described consensus IFN-α variants is an [D105N, E134T]interferon alfacon-1 glycopeptide, where the [D105N, E134T]interferon alfacon-1 glycopeptide is a variant of the interferon alfacon-1 polypeptide having (a) an asparagine residue substituted for the native aspartic acid residue at amino acid position 105 in the amino acid sequence of Infergen depicted in FIG. 24 (b) a threonine residue substituted for the native glutamic acid residue at amino acid position 134 in the amino acid sequence of Infergen depicted in FIG. 24 (where the amino acid positions are as set forth in FIG. 24; and where D105 and E134 in FIG. 24 correspond to D78 and E107, respectively, in FIG. 9); and (c) a carbohydrate moiety covalently attached to the R-group of each of said asparagine and threonine residues.

Hybrid Type I Interferon Receptor Polypeptide Agonists

[0461] As used herein, a “hybrid Type I interferon receptor polypeptide agonist” is a polypeptide having an amino acid sequence comprising discrete sub-sequences corresponding in amino acid identity and number to sub-sequences of different, naturally occurring Type I interferon receptor polypeptide agonists, wherein the amino acid sequence of the subject polypeptide agonist differs from that of any naturally-occurring Type I interferon receptor polypeptide agonist. In some embodiments, the polypeptide variant is composed of discrete sub-sequences selected from IFN-α2b, IFN-α14, IFN-β1, and IFN-ω, and the amino acid sequence of the polypeptide variant agonist differs from the amino acid sequences of IFN-α2b, IFN-α14, IFN-β1, and IFN-ω. In other embodiments, the polypeptide variant is composed of discrete sub-sequences selected from IFN-α2b, IFN-α14, IFN-β1, Infergen® consensus IFN-α, and IFN-ω, and the amino acid sequence of polypeptide variant differs from the amino acid sequences of IFN-α2b, IFN-α14, IFN-β1, Infergen® consensus IFN-α, and IFN-ω.

[0462] Suitable protease-resistant or protease-resistant, hyperglycosylated polypeptide variants include protease-resistant or protease-resistant, hyperglycosylated forms of any parent hybrid Type I interferon receptor polypeptide agonist. In one aspect, a protease-resistant or protease-resistant, hyperglycosylated variant of a parent hybrid Type I interferon receptor polypeptide agonist has an amino acid sequence that differs from the amino acid sequence of the parent polypeptide to the extent that the variant comprises one or more glycosylation sites not found in the parent polypeptide; and comprises at least one mutated protease cleavage site in place of a native protease cleavage site found in the parent polypeptide.

[0463] In one aspect, the parent hybrid Type I interferon receptor polypeptide agonist is [D99N]IFN-α2a glycopeptide, where the [D99N]IFN-α2a glycopeptide is a variant of IFN-α2a having an asparagine residue in place of the native aspartic acid residue at amino acid position 99 in the amino acid sequence of IFN-α2a; and the protease-resistant or protease-resistant, hyperglycosylated polypeptide variant of the parent polypeptide is a protease-resistant [D99N, D105N]IFN-α2a glycopeptide, where the protease-resistant [D99N, D105N]IFN-α2a glycopeptide is a variant of IFN-α2a having (a) an asparagine residue in place of the native aspartic acid residue at each of amino acid positions 99 and 105 in the amino acid sequence of IFN-α2a (where the D99 and D105 amino acid positions are as set forth in FIG. 24; and correspond to D71 and D77, respectively, of the amino acid sequence of IFN-α2a set forth in FIG. 1); and (b) a carbohydrate moiety covalently attached to the R-group of each of said asparagine residues; and comprises at least one mutated protease cleavage site in place of a native protease cleavage site found in the parent polypeptide. It will be appreciated that the amino acid sequence of IFN-α2a is the same as the amino acid sequence of IFN-α2b depicted in FIG. 24, provided that the IFN-α2a sequence has a lysine residue in place of the arginine residue at amino acid position 50 in the IFN-α2b sequence shown in FIG. 24 (corresponding to R50 of the IFN-α2b sequence set forth in FIG. 2).

[0464] In another aspect, the parent hybrid Type I interferon receptor polypeptide agonist is [D99N]IFN-α2b glycopeptide, where the [D99N]IFN-α2b glycopeptide is a variant of IFN-α2b having an asparagine residue in place of the native aspartic acid residue at amino acid position 99 in the amino acid sequence of IFN-α2b depicted in FIG. 24; and the protease-resistant or protease-resistant, hyperglycosylated polypeptide variant of the parent polypeptide is a protease-resistant [D99N, D105N]IFN-α2b glycopeptide, where the protease-resistant [D99N, D105N]IFN-α2b glycopeptide is a variant of IFN-α2b having (a) an asparagine residue in place of the native aspartic acid residue at each of amino acid positions 99 and 105 in the amino acid sequence of IFN-α2b depicted in FIG. 24 (where the D99 and D105 amino acid positions are as set forth in FIG. 24; and corresponds to D71 and D77, respectively, of the amino acid sequence of IFN-α2b set forth in FIG. 2); and (b) a carbohydrate moiety covalently attached to the R-group of each of said asparagine residues; and comprises at least one mutated protease cleavage site in place of a native protease cleavage site found in the parent polypeptide.

[0465] In another aspect, the parent hybrid Type I interferon receptor polypeptide agonist is the interferon alfacon-1 polypeptide; and the protease-resistant or protease-resistant, hyperglycosylated polypeptide variant of the parent polypeptide is an [D99N]interferon alfacon-1 glycopeptide, where the [D99N]interferon alfacon-1 glycopeptide is a variant of the interferon alfacon-1 polypeptide having (a) an asparagine residue substituted for the native aspartic acid residue at amino acid position 99 in the amino acid sequence of Infergen depicted in FIG. 24 (where the D99 amino acid position is as set forth in FIG. 24; and corresponds to D72 of the amino acid sequence of consensus IFN-α set forth in FIG. 9); and (b) a carbohydrate moiety covalently attached to the R-group of said asparagine residue; and comprises at least one mutated protease cleavage site in place of a native protease cleavage site found in the parent polypeptide.

[0466] In another aspect, the parent hybrid Type I interferon receptor polypeptide agonist is the interferon alfacon-1 polypeptide; and the protease-resistant or protease-resistant, hyperglycosylated polypeptide variant of the parent polypeptide is an [D99N, D105N]interferon alfacon-1 glycopeptide, where the [D99N, D105N]interferon alfacon-1 glycopeptide is a variant of the interferon alfacon-1 polypeptide having (a) an asparagine residue substituted for each of the native aspartic acid residues at amino acid positions 99 and 105 in the amino acid sequence of Infergen depicted in FIG. 24 (where the D99 and D105 amino acid positions are as set forth in FIG. 24; and correspond to D72 and D78, respectively, of the amino acid sequence of consensus IFN-α set forth in FIG. 9); and (b) a carbohydrate moiety covalently attached to the R-group of each of said asparagine residues; and comprises at least one mutated protease cleavage site in place of a native protease cleavage site found in the parent polypeptide.

[0467] In another aspect, the parent hybrid Type I interferon receptor polypeptide agonist is the interferon alfacon-1 polypeptide; and the protease-resistant or protease-resistant, hyperglycosylated polypeptide variant of the parent polypeptide is an [D99N, D105N, E134N]interferon alfacon-1 glycopeptide, where the [D99N, D105N, E134N]interferon alfacon-1 glycopeptide is a variant of the interferon alfacon-1 polypeptide having (a) an asparagine residue substituted for each of the native aspartic acid, aspartic acid, and glutamic acid residues at amino acid positions 99, 105 and 134, respectively, in the amino acid sequence of Infergen depicted in FIG. 24 (where the D99, D105, and E134 amino acid positions are as set forth in FIG. 24; and correspond to D72, D78, and E1207, respectively, of the amino acid sequence of consensus IFN-α set forth in FIG. 9); and (b) a carbohydrate moiety covalently attached to the R-group of each of said asparagine residues; and comprises at least one mutated protease cleavage site in place of a native protease cleavage site found in the parent polypeptide.

[0468] In another aspect, the parent hybrid Type I interferon receptor polypeptide agonist is the interferon alfacon-1 polypeptide; and the protease-resistant or protease-resistant, hyperglycosylated polypeptide variant of the parent polypeptide is an [D99N, E134N]interferon alfacon-1 glycopeptide, where the [D99N, E134N]interferon alfacon-1 glycopeptide is a variant of the interferon alfacon-1 polypeptide having (a) an asparagine residue substituted for each of the native aspartic acid and glutamic acid residues at amino acid positions 99 and 134, respectively, in the amino acid sequence of Infergen depicted in FIG. 24 (where the D99 and E134 amino acid positions are as set forth in FIG. 24; and correspond to D72 and E107, respectively, of the amino acid sequence of consensus IFN-αset forth in FIG. 9); and (b) a carbohydrate moiety covalently attached to the R-group of each of said asparagine residues; and comprises at least one mutated protease cleavage site in place of a native protease cleavage site found in the parent polypeptide.

[0469] In another aspect, the parent hybrid Type I interferon receptor polypeptide agonist is the interferon alfacon-1 polypeptide; and the protease-resistant or protease-resistant, hyperglycosylated polypeptide variant of the parent polypeptide is an [D105N, E134N]interferon alfacon-1 glycopeptide, where the [D105N, E134N]interferon alfacon-1 glycopeptide is a variant of the interferon alfacon-1 polypeptide having (a) an asparagine residue substituted for each of the native aspartic acid and glutamic acid residues at amino acid positions 105 and 134, respectively, in the amino acid sequence of Infergen depicted in FIG. 24 (where the D105 and E134 amino acid positions are as set forth in FIG. 24; and correspond to D78 and E107, respectively, of the amino acid sequence of consensus IFN-α set forth in FIG. 9); and (b) a carbohydrate moiety covalently attached to the R-group of each of said asparagine residues; and comprises at least one mutated protease cleavage site in place of a native protease cleavage site found in the parent polypeptide.

[0470] In another aspect, the parent hybrid Type I interferon receptor polypeptide agonist is the interferon alfacon-1 polypeptide; and the protease-resistant or protease-resistant, hyperglycosylated polypeptide variant of the parent polypeptide is an [D99N, E134T]interferon alfacon-1 glycopeptide is a variant of the interferon alfacon-1 polypeptide having (a) an asparagine residue substituted for each of the native aspartic acid residues at amino acid positions 99 and 105 in the amino acid sequence of Infergen depicted in FIG. 24; (b) a threonine residue substituted for the native glutamic acid residue at amino acid position 134 in the amino acid sequence of Infergen depicted in FIG. 24 (where the D99, D105, and E134 amino acid positions are as set forth in FIG. 24; and correspond to D72, D78, and E107, respectively, of the amino acid sequence of consensus IFN-α set forth in FIG. 9); and (c) a carbohydrate moiety covalently attached to the R-group of each of said asparagine and threonine residues; and comprises at least one mutated protease cleavage site in place of a native protease cleavage site found in the parent polypeptide.

[0471] In another aspect, the parent hybrid Type I interferon receptor polypeptide agonist is the interferon alfacon-1 polypeptide; and the protease-resistant or protease-resistant, hyperglycosylated polypeptide variant of the parent polypeptide is an [D99N, E134T]interferon alfacon-1 glycopeptide, where the [D99N, E134T]interferon alfacon-1 glycopeptide is a variant of the interferon alfacon-1 polypeptide having (a) an asparagine residue substituted for the native aspartic acid residue at amino acid position 99 in the amino acid sequence of Infergen depicted in FIG. 24; (b) a threonine residue substituted for the native glutamic acid residue at amino acid position 134 in the amino acid sequence of Infergen depicted in FIG. 24 (where the D99 and E134 amino acid positions are as set forth in FIG. 24; and correspond to D72 and E107, respectively, of the amino acid sequence of consensus IFN-α set forth in FIG. 9); and (c) a carbohydrate moiety covalently attached to the R-group of each of said asparagine and threonine residues; and comprises at least one mutated protease cleavage site in place of a native protease cleavage site found in the parent polypeptide.

[0472] In another aspect, the parent hybrid Type I interferon receptor polypeptide agonist is the interferon alfacon-1 polypeptide; and the protease-resistant or protease-resistant, hyperglycosylated polypeptide variant is an [D105N, E134T]interferon alfacon-1 glycopeptide, where the [D105N, E134T]interferon alfacon-1 glycopeptide is a variant of the interferon alfacon-1 polypeptide having (a) an asparagine residue substituted for the native aspartic acid residue at amino acid position 105 in the amino acid sequence of Infergen depicted in FIG. 24; (b) a threonine residue substituted for the native glutamic acid residue at amino acid position 134 in the amino acid sequence of Infergen depicted in FIG. 24 (where the D105 and E134 amino acid positions are as set forth in FIG. 24; and correspond to D78 and E107, respectively, of the amino acid sequence of consensus IFN-α set forth in FIG. 9); and (c) a carbohydrate moiety covalently attached to the R-group of each of said asparagine and threonine residues; and comprises at least one mutated protease cleavage site in place of a native protease cleavage site found in the parent polypeptide.

[0473] In another aspect, the parent hybrid Type I interferon receptor polypeptide agonist is the “majority” consensus Type I interferon amino acid sequence depicted in FIG. 24; and the protease-resistant or protease-resistant, hyperglycosylated polypeptide variant of the parent polypeptide is a [D99N]“majority” consensus Type I interferon glycopeptide, where the [D99N]“majority” consensus Type I interferon glycopeptide is the “majority” amino acid sequence depicted in FIG. 24 having (a) an asparagine residue substituted for the native aspartic acid residue at amino acid position 99 in the “majority” amino acid sequence and (b) a carbohydrate moiety covalently attached to the R-group of said asparagine residue; and comprises at least one mutated protease cleavage site in place of a native protease cleavage site found in the parent polypeptide.

[0474] In another aspect, the parent hybrid Type I interferon receptor polypeptide agonist is the “majority” consensus Type I interferon amino acid sequence depicted in FIG. 24; and the protease-resistant or protease-resistant, hyperglycosylated polypeptide variant of the parent polypeptide is a [D99N, D105N]“majority” consensus Type I interferon glycopeptide, where the [D99N, D105N]“majority” consensus Type I interferon glycopeptide is the “majority” amino acid sequence depicted in FIG. 24 having (a) an asparagine residue substituted for each of the native aspartic acid residues at amino acid positions 99 and 105 in the “majority” amino acid sequence and (b) a carbohydrate moiety covalently attached to the R-group of each of said asparagine residues; and comprises at least one mutated protease cleavage site in place of a native protease cleavage site found in the parent polypeptide.

[0475] In another aspect, the parent hybrid Type I interferon receptor polypeptide agonist is the “majority” consensus Type I interferon amino acid sequence depicted in FIG. 24; and the protease-resistant or protease-resistant, hyperglycosylated polypeptide variant of the parent polypeptide is a [D99N, D105N, E134N]“majority” consensus Type I interferon glycopeptide, where the [D99N, D105N, E134N]“majority” consensus Type I interferon glycopeptide is the “majority” amino acid sequence depicted in FIG. 24 having (a) an asparagine residue substituted for each of the native aspartic acid, aspartic acid, and glutamic acid residues at amino acid positions 99, 105 and 134, respectively, in the “majority” amino acid sequence and (b) a carbohydrate moiety covalently attached to the R-group of each of said asparagine residues; and comprises at least one mutated protease cleavage site in place of a native protease cleavage site found in the parent polypeptide.

[0476] In another aspect, the parent hybrid Type I interferon receptor polypeptide agonist is the “majority” consensus Type I interferon amino acid sequence depicted in FIG. 24; and the protease-resistant or protease-resistant, hyperglycosylated polypeptide variant of the parent polypeptide is a [D99N, E134N]“majority” consensus Type I interferon glycopeptide, where the [D99N, E134N]“majority” consensus Type I interferon glycopeptide is the “majority” amino acid sequence depicted in FIG. 24 having (a) an asparagine residue substituted for each of the native aspartic acid and glutamic acid residues at amino acid positions 99 and 134, respectively, in the “majority” amino acid sequence (where the amino acid positions are as set forth in FIG. 24); and (b) a carbohydrate moiety covalently attached to the R-group of each of said asparagine residues; and comprises at least one mutated protease cleavage site in place of a native protease cleavage site found in the parent polypeptide.

[0477] In another aspect, the parent hybrid Type I interferon receptor polypeptide agonist is the “majority” consensus Type I interferon amino acid sequence depicted in FIG. 24; and the protease-resistant or protease-resistant, hyperglycosylated polypeptide variant of the parent polypeptide is a [D105N, E134N]“majority” consensus Type I interferon glycopeptide, where the [D105N, E134N]“majority” consensus Type I interferon glycopeptide is the “majority” amino acid sequence depicted in FIG. 24 having (a) an asparagine residue substituted for each of the native aspartic acid and glutamic acid residues at amino acid positions 105 and 134, respectively, in the “majority” amino acid sequence (where the amino acid positions are as set forth in FIG. 24); and (b) a carbohydrate moiety covalently attached to the R-group of each of said asparagine residues; and comprises at least one mutated protease cleavage site in place of a native protease cleavage site found in the parent polypeptide.

[0478] In another aspect, the parent hybrid Type I interferon receptor polypeptide agonist is the “majority” consensus Type I interferon amino acid sequence depicted in FIG. 24; and the protease-resistant or protease-resistant, hyperglycosylated polypeptide variant of the parent polypeptide is a [D99N, D105N, E134T]“majority” consensus Type I interferon glycopeptide, where the [D99N, D105N, E134T]“majority” consensus Type I interferon glycopeptide is the “majority” amino acid sequence depicted in FIG. 24 having (a) an asparagine residue substituted for each of the native aspartic acid residues at amino acid positions 99 and 105 in the “majority” amino acid sequence (b) a threonine residue substituted for the native glutamic acid residue at amino acid position 134 in the “majority” amino acid sequence and (c) a carbohydrate moiety covalently attached to the R-group of each of said asparagine and threonine residues; and comprises at least one mutated protease cleavage site in place of a native protease cleavage site found in the parent polypeptide.

[0479] In another aspect, the parent hybrid Type I interferon receptor polypeptide agonist is the “majority” consensus Type I interferon amino acid sequence depicted in FIG. 24; and the protease-resistant or protease-resistant, hyperglycosylated polypeptide variant of the parent polypeptide is a [D99N, E134T]“majority” consensus Type I interferon glycopeptide, where the [D99N, E134T]“majority” consensus Type I interferon glycopeptide is the “majority” amino acid sequence depicted in FIG. 24 having (a) an asparagine residue substituted for the native aspartic acid residue at amino acid position 99 in the “majority” amino acid sequence (b) a threonine residue substituted for the native glutamic acid residue at amino acid position 134 in the “majority” amino acid sequence and (c) a carbohydrate moiety covalently attached to the R-group of each of said asparagine and threonine residues; and comprises at least one mutated protease cleavage site in place of a native protease cleavage site found in the parent polypeptide.

[0480] In another aspect, the parent hybrid Type I interferon receptor polypeptide agonist is the “majority” consensus Type I interferon amino acid sequence depicted in FIG. 24; and the protease-resistant or protease-resistant, hyperglycosylated polypeptide variant of the parent polypeptide is a [D105N, E134T]“majority” consensus Type I interferon glycopeptide, where the [D105N, E134T]“majority” consensus Type I interferon glycopeptide is the “majority” amino acid sequence depicted in FIG. 24 having (a) an asparagine residue substituted for the native aspartic acid residue at amino acid position 105 in the “majority” amino acid sequence (b) a threonine residue substituted for the native glutamic acid residue at amino acid position 134 in the “majority” amino acid sequence (where the amino acid positions are as set forth in FIG. 24); and (c) a carbohydrate moiety covalently attached to the R-group of each of said asparagine and threonine residues; and comprises at least one mutated protease cleavage site in place of a native protease cleavage site found in the parent polypeptide.

[0481] The numbering of amino acid replacements (discussed in the context of generating hyperglycosylation variants of the parent protein therapeutic) used to describe the protease-resistant or protease-resistant, hyperglycosylated polypeptide variants of parent hybrid Type I receptor polypeptide agonists herein coincides with the numbering of amino acids used to depict the Type I interferon amino acid sequences appearing in FIG. 24.

[0482] In another aspect, a protease-resistant or protease-resistant, hyperglycosylated polypeptide variant of a parent hybrid Type I interferon receptor polypeptide agonist therapeutic differs from the parent hybrid Type I interferon receptor polypeptide agonist therapeutic to the extent that the protease-resistant or protease-resistant, hyperglycosylated polypeptide variant comprises (1) a carbohydrate moiety covalently attached to a non-native glycosylation site not found in the parent hybrid Type I interferon receptor polypeptide agonist therapeutic and/or (2) a carbohydrate moiety covalently attached to a native glycosylation site found but not glycosylated in the parent hybrid Type I interferon receptor polypeptide agonist therapeutic.

[0483] In some embodiments, any of the above-described hyperglycosylated, protease-resistant consensus IFN-α variants has increased stability compared to the unmodified (parent) cytokine, where the stability is assessed by measuring residual biological activity after incubation with either a mixture of proteases, individual proteases, blood lysate, or serum, as described above. In other embodiments, any of the above-described hyperglycosylated, protease-resistant consensus IFN-α variants has increased biological activity compared to the unmodified (parent) cytokine, after incubation with either a mixture of proteases, individual proteases, blood lysate, or serum, as described above.

IFN-β Polypeptide Variants

[0484] In some embodiments, a protease-resistant or protease-resistant, hyperglycosylated cytokine variant is an IFN-β variant. In some embodiments, the protease-resistant or protease-resistant, hyperglycosylated IFN-β variant comprises one or more single amino acid replacements in SEQ ID NO:197 (or the amino acid sequence as set forth in FIG. 3), corresponding to the replacement of one or more of: M by V at position 1, M by I at position 1, M by T at position 1, M by Q at position 1, M by A at position 1, L by V at position 5, L by I at position 5, L by T at position 5, L by Q at position 5, L by H at position 5, L by A at position 5, F by I at position 8, F by V at position 8, L by V at position 9, L by I at position 9, L by T at position 9, L by Q at position 9, L by H at position 9, L by A at position 9, R by H at position 11, R by Q at position 11, F by I at position 15, F by V at position 15, K by Q at position 19, K by T at position 19, K by S at position 19, K by H at position 19, W by S at position 22, W by H at position 22, N by H at position 25, N by S at position 25, N by Q at position 25, R by H position 27, R by Q position 27, L by V at position 28, L by I at position 28, L by T at position 28, L by Q at position 28, L by H at position 28, L by A at position 28, E by Q at position 29, E by H at position 29, Y by H at position 30, Y by I at position 30, L by V at position 32, L by I at position 32, L by T at position 32, L by Q at position 32, L by H at position 32, L by A at position 32, K by Q at position 33, K by T at position 33, K by S at position 33, K by H at position 33, R by H at position 35, R by Q at position 35, M by V at position 36, M by I at position 36, M by T at position 36, M by Q at position 36, M by A at position 36, D by Q at position 39, D by H at position 39, D by G at position 39, E by Q at position 42, E by H at position 42, K by Q at position 45, K by T at position 45, K by S at position 45, K by H at position 45, L by V at position 47, L by I at position 47, L by T at position 47, L by Q at position 47, L by H at position 47, L by A at position 47, K by Q at position 52, K by T at position 52, K by S at position 52, K by H at position 52, F by I at position 67, F by V at position 67, R by H at position 71, R by Q at position 71, D by Q at position 73, D by H at position 73, D by G at position 73, E by Q at position 81, E by H at position 81, E by Q at position 85, E by H at position 85, Y by H at position 92, Y by I at position 92, K by Q at position 99, K by T at position 99, K by S at position 99, K by H at position 99, E by Q at position 103, E by H at position 103, E by Q at position 104, E by H at position 104, K by Q at position 105, K by T at position 105, K by S at position 105, K by H at position 105, E by Q at position 107, E by H at position 107, K by Q at position 108, K by T at position 108, K by S at position 108, K by H at position 108, E by Q at position 109, E by H at position 109, D by Q at position 110, D by H at position 110, D by G at position 110, F by I at position 111, F by V at position 111, R by H at position 113, R by Q at position 113, L by V at position 116, L by I at position 116, L by T at position 116, L by Q at position 116, L by H at position 116, L by A at position 116, L by V at position 120, L by I at position 120, L by T at position 120, L by Q at position 120, L by H at position 120, L by A at position 120, K by Q at position 123, K by T at position 123, K by S at position 123, K by H at position 123, R by H at position 124, R by Q at position 124, R by H at position 128, R by Q at position 128, L by V at position 130, L by I at position 130, L by T at position 130, L by Q at position 130, L by H at position 130, L by A at position 130, K by Q at position 134, K by T at position 134, K by S at position 134, K by H at position 134, K by Q at position 136, K by T at position 136, K by S at position 136, K by H at position 136, E by Q at position 137, E by H at position 137, Y by H at position 138, Y by I at position 138, R by H at position 152, R by Q at position 152, Y by H at position 155, Y by I at position 155, R by H at position 159, R by Q at position 159, Y by H at position 163, Y by I at position 163, R by H at position 165, R by Q at position 165, M by D at position 1, M by E at position 1, M by K at position 1, M by N at position 1, M by R at position 1, M by S at position 1, L by D at position 5, L by E at position 5, L by K at position 5, L by N at position 5, L by R at position 5, L by S at position 5, L by D at position 6, L by E at position 6, L by K at position 6, L by N at position 6, L by R at position 6, L by S at position 6, L by Q at position 6, L by T at position 6, F by E at position 8, F by K at position 8, F by R at position 8, F by D at position 8, L by D at position 9, L by E at position 9, L by K at position 9, L by N at position 9, L by R at position 9, L by S at position 9, Q by D at position 10, Q by E at position 10, Q by K at position 10, Q by N at position 10, Q by R at position 10, Q by S at position 10, Q by T at position 10, S by D at position 12, S by E at position 12, S by K at position 12, S by R at position 12, S by D at position 13, S by E at position 13, S by K at position 13, S by R at position 13, S by N at position 13, S by Q at position 13, S by T at position 13, N by D at position 14, N by E at position 14, N by K at position 14, N by Q at position 14, N by R at position 14, N by S at position 14, N by T at position 14, F by D at position 15, F by E at position 15, F by K at position 15, F by R at position 15, Q by D at position 16, Q by E at position 16, Q by K at position 16, Q by N at position 16, Q by R at position 16, Q by S at position 16, Q by T at position 16, C by D at position 17, C by E at position 17, C by K at position 17, C by N at position 17, C by Q at position 17, C by R at position 17, C by S at position 17, C by T at position 17, L by N at position 20, L by Q at position 20, L by R at position 20, L by S at position 20, L by T at position 20, L by D at position 20, L by E at position 20, L by K at position 20, W by D at position 22, W by E at position 22, W by K at position 22, W by R at position 22, Q by D at position 23, Q by E at position 23, Q by K at position 23, Q by R at position 23, L by D at position 24, L by E at position 24, L by K at position 24, L by R at position 24, W by D at position 79, W by E at position 79, W by K at position 79, W by R at position 79, N by D at position 80, N by E at position 80, N by K at position 80, N by R at position 80, T by D at position 82, T by E at position 82, T by K at position 82, T by R at position 82, I by D at position 83, I by E at position 83, I by K at position 83, I by R at position 83, I by N at position 83, I by Q at position 83, I by S at position 83, I by T at position 83, N by D at position 86, N by E at position 86, N by K at position 86, N by R at position 86, N by Q at position 86, N by S at position 86, N by T at position 86, L by D at position 87, L by E at position 87, L by K at position 87, L by R at position 87, L by N at position 87, L by Q at position 87, L by S at position 87, L by T at position 87, A by D at position 89, A by E at position 89, A by K at position 89, A by R at position 89, N by D at position 90, N by E at position 90, N by K at position 90, N by Q at position 90, N by R at position 90, N by S at position 90, N by T at position 90, V by D at position 91, V by E at position 91, V by K at position 91, V by N at position 91, V by Q at position 91, V by R at position 91, V by S at position 91, V by T at position 91, Q by D at position 94, Q by E at position 94, Q by Q at position 94, Q by N at position 94, Q by R at position 94, Q by S at position 94, Q by T at position 94, I by D at position 95, I by E at position 95, I by K at position 95, I by N at position 95, 1 by Q at position 95, 1 by R at position 95, I by S at position 95, I by T at position 95, H by D at position 97, H by E at position 97, H by K at position 97, H by N at position 97, H by Q at position 97, H by R at position 97, H by S at position 97, H by T at position 97, L by D at position 98, L by E at position 98, L by K at position 98, L by N at position 98, L by Q at position 98, L by R at position 98, L by S at position 98, L by T at position 98, V by D at position 101, V by E at position 101, V by K at position 101, V by N at position 101, V by Q at position 101, V by R at position 101, V by S at position 101, V by T at position 101, M by C at position 1, L by C at position 6, Q by C at position 10, S by C at position 13, Q by C at position 16, L by C at position 17, V by C at position 101, L by C at position 98, H by C at position 97, Q by C at position 94, V by C at position 91, or N by C at position 90, wherein residue 1 corresponds to residue 1 of the mature IFN-β cytokine set forth in SEQ ID NO:197; and further comprises an amino acid sequence that differs from the amino acid sequence of the parent polypeptide to the extent that the variant comprises one or more glycosylation sites not found in the parent polypeptide.

3-D SSXtructural Homologs

[0485] In other embodiments, the hyperglycosylated, protease-resistant interferon variant is a modified IFN-β cytokine, comprising one or more amino acid replacements at one or more target positions in SEQ ID NO: 197 (as set forth in FIG. 3) corresponding to a structurally-related modified amino acid position within the 3-dimensional structure of an above-described IFN-α2b polypeptide variant, where the replacement(s) lead to greater resistance to proteases, as assessed by incubation with a protease or with a blood lysate or by incubation with serum (as described above), compared to the unmodified IFN-β. In some of these embodiments, the modified IFN-β is selected from among proteins comprising one or more single amino acid replacements at one or more target positions in SEQ ID NO: 197 (as set forth in FIG. 3), corresponding to any of amino acid positions: 39, 42, 45, 47, 52, 67, 71, 73, 81, 107, 108, 109, 110, 111, 113, 116, 120, 123, 124, 128, 130, 134, 136, 137, 163 and 165, where the mutations include insertions, deletions and replacements of the native amino acid residue(s); where the variant further comprises an amino acid sequence that differs from the amino acid sequence of the parent polypeptide to the extent that the variant comprises one or more glycosylation sites not found in the parent polypeptide.

[0486] In other embodiments, the hyperglycosylated, protease-resistant interferon variant is a modified IFN-β cytokine comprising one or more amino acid replacements, where the replacements are selected from amino acid substitutions in SEQ ID NO: 197 (as set forth in FIG. 3) corresponding to: D by Q at position 39, D by H at position 39, D by G at position 39, E by Q at position 42, E by H at position 42, K by Q at position 45, K by T at position 45, K by S at position 45, K by H at position 45, L by V at position 47, L by I at position 47, L by T at position 47, L by Q at position 47, L by H at position 47, L by A at position 47, K by Q at position 52, K by T at position 52, K by S at position 52, K by H at position 52, F by I at position 67, F by V at position 67, R by H at position 71, R by Q at position 71, D by H at position 73, D by G at position 73, D by Q at position 73, E by Q at position 81, E by H at position 81, E by Q at position 107, E by H at position 107, K by Q at position 108, K by T at position 108, K by S at position 108, K by H at position 108, E by Q at position 109, E by H at position 109, D by Q at position 110, D by H at position 110, D by G at position 110, F by I at position 111, F by V at position 111, R by H at position 113, R by Q at position 113, L by V at position 116, L by I at position 116, L by T at position 116, L by Q at position 116, L by H at position 116, L by A at position 116, L by V at position 120, L by I at position 120, L by T at position 120, L by Q at position 120, L by H at position 120, L by A at position 120, K by Q at position 123, K by T at position 123, K by S at position 123, K by H at position 123, R by H at position 124, R by Q at position 124, R by H at position 128, R by Q at position 128, L by V at position 130, L by I at position 130, L by T at position 130, L by Q at position 130, L by H at position 130, L by A at position 130, K by Q at position 134, K by T at position 134, K by S at position 134, K by H at position 134, K by Q at position 136, K by T at position 136, K by S at position 136, K by H at position 136, E by Q at position 137, E by H at position 137, Y by H at position 163, Y by I at position 1631, R by H at position 165, or R by Q at position 165, wherein the first amino acid listed is substituted by the second at the position indicated; where the variant further comprises an amino acid sequence that differs from the amino acid sequence of the parent polypeptide to the extent that the variant comprises one or more glycosylation sites not found in the parent polypeptide.

[0487] In some embodiments, any of the above-described hyperglycosylated, protease-resistant IFN-β variants has increased stability compared to the unmodified (parent) cytokine, where the stability is assessed by measuring residual biological activity after incubation with either a mixture of proteases, individual proteases, blood lysate, or serum, as described above. In other embodiments, any of the above-described hyperglycosylated, protease-resistant IFN-β variants has increased biological activity compared to the unmodified (parent) cytokine, after incubation with either a mixture of proteases, individual proteases, blood lysate, or serum, as described above.

[0488] In other embodiments, the hyperglycosylated, protease-resistant interferon variant is a modified IFN-β1 cytokine, comprising one or more amino acid replacements at one or more target positions in SEQ ID NO:196 (as set forth in FIG. 22) corresponding to a structurally-related modified amino acid position within the 3-dimensional structure of an above-described IFN-α2b polypeptide variant, where the replacement(s) lead to greater resistance to proteases, as assessed by incubation with a protease or with a blood lysate or by incubation with serum (as described above), compared to the unmodified IFN-β1. In some of these embodiments, the modified IFN-β1 is selected from among proteins comprising one or more single amino acid replacements at one or more target positions in SEQ ID NO:196 (as set forth in FIG. 22), corresponding to any of amino acid positions: 39, 42, 45, 47, 52, 67, 71, 73, 81, 107, 108, 109, 110, 111, 113, 116, 120, 123, 124, 128, 130, 134, 136, 137, 163 and 165, where the mutations include insertions, deletions and replacements of the native amino acid residue(s); where the variant further comprises an amino acid sequence that differs from the amino acid sequence of the parent polypeptide to the extent that the variant comprises one or more glycosylation sites not found in the parent polypeptide.

[0489] In some embodiments, any of the above-described hyperglycosylated, protease-resistant IFN-β1 variants has increased stability compared to the unmodified (parent) cytokine, where the stability is assessed by measuring residual biological activity after incubation with either a mixture of proteases, individual proteases, blood lysate, or serum, as described above. In other embodiments, any of the above-described hyperglycosylated, protease-resistant IFN-β1 variants has increased biological activity compared to the unmodified (parent) cytokine, after incubation with either a mixture of proteases, individual proteases, blood lysate, or serum, as described above.

[0490] In other embodiments, the protease-resistant interferon variant is a modified IFN-β2a cytokine, comprising one or more amino acid replacements at one or more target positions in SEQ ID NO:198 (as set forth in FIG. 23) corresponding to a structurally-related modified amino acid position within the 3-dimensional structure of an above-described IFN-α2b polypeptide variant, where the replacement(s) lead to greater resistance to proteases, as assessed by incubation with a protease or with a blood lysate or by incubation with serum (as described above), compared to the unmodified IFN-β2a. In some of these embodiments, the modified IFN-β2a is selected from among proteins comprising one or more single amino acid replacements at one or more target positions in SEQ ID NO: 198 (as set forth in FIG. 23), corresponding to any of amino acid positions: 39, 42, 45, 47, 52, 67, 71, 73, 81, 107, 108, 109, 110, 111, 113, 116, 120, 123, 124, 128, 130, 134, 136, 137, 163 and 165, where the mutations include insertions, deletions and replacements of the native amino acid residue(s); where the variant further comprises an amino acid sequence that differs from the amino acid sequence of the parent polypeptide to the extent that the variant comprises one or more glycosylation sites not found in the parent polypeptide.

[0491] In some embodiments, any of the above-described hyperglycosylated, protease-resistant polypeptide IFN-β2a variants has increased stability compared to the unmodified (parent) cytokine, where the stability is assessed by measuring residual biological activity after incubation with either a mixture of proteases, individual proteases, blood lysate, or serum, as described above. In other embodiments, any of the above-described hyperglycosylated, protease-resistant IFN-β2a variants has increased biological activity compared to the unmodified (parent) cytokine, after incubation with either a mixture of proteases, individual proteases, blood lysate, or serum, as described above.

[0492] In another aspect, the present invention provides a cytokine structural homolog of any of the above-described protease-resistant IFN-β variants, where the homolog comprises one or more amino acid replacements at positions corresponding to the 3-dimentional-structurally-similar modified positions within the 3-dimensional structure of the modified IFN-β. In many embodiments, the homolog has increased resistance to proteolysis compared to its unmodified cytokine counterpart, wherein the resistance to proteolysis is measured by mixture with a protease in vitro, incubation with blood, or incubation with serum. In many embodiments, the cytokine is an IFN-β cytokine.

[0493] In another aspect, the present invention provides a modified IFN-β cytokine (e.g., a hyperglycosylated, protease-resistant IFN-β variant), comprising one or more amino acid replacements at one or more target positions in SEQ ID NO. 197 (the amino acid sequence set forth in FIG. 3) corresponding to a structurally-related modified amino acid position within the 3-dimensional structure of any of the above-described IFN-β modified cytokines, where the replacements lead to greater resistance to proteases, as assessed by incubation with a protease or a with a blood lysate or by incubation with serum, compared to the unmodified IFN-β.

[0494] In some embodiments, any of the above-described hyperglycosylated, protease-resistant IFN-β variants has increased stability compared to the unmodified (parent) cytokine, where the stability is assessed by measuring residual biological activity to either inhibit viral replication or to stimulate cell proliferation in appropriate cells, after incubation with either a mixture of proteases, individual proteases, blood lysate, or serum, as described above.

[0495] In some embodiments, any of the above-described hyperglycosylated, protease-resistant IFN-β variants has increased biological activity compared to the unmodified (parent) cytokine, where the activity is assessed by the capacity to either inhibit viral replication in appropriate cells, or to inhibit cell proliferation in appropriate cells, after incubation with either a mixture of proteases, individual proteases, blood lysate, or serum, as described above.

[0496] In some embodiments, a hyperglycosylated, protease-resistant IFN-β variant (a “modified IFN-β cytokine”) is selected from the group of proteins comprising one or more single amino acid replacements in SEQ ID NO:197, as set forth in FIG. 3, corresponding to the replacement of: M by V at position 1, M by I at position 1, M by T at position 1, M by Q at position 1, M by A at position 1, L by V at position 5, L by I at position 5, L by T at position 5, L by Q at position 5, L by H at position 5, L by A at position 5, F by I at position 8, F by V at position 8, L by V at position 9, L by I at position 9, L by T at position 9, L by Q at position 9, L by H at position 9, L by A at position 9, R by H at position 11, R by Q at position 11, F by I at position 15, F by V at position 15, K by Q at position 19, K by T at position 19, K by S at position 19, K by H at position 19, W by S at position 22, W by H at position 22, N by H at position 25, N by S at position 25, N by Q at position 25, R by H position 27, R by Q position 27, L by V at position 28, L by I at position 28, L by T at position 28, L by Q at position 28, L by H at position 28, L by A at position 28, E by Q at position 29, E by H at position 29, Y by H at position 30, Y by I at position 30, L by V at position 32, L by I at position 32, L by T at position 32, L by Q at position 32, L by H at position 32, L by A at position 32, K by Q at position 33, K by T at position 33, K by S at position 33, K by H at position 33, R by H at position 35, R by Q at position 35, M by V at position 36, M by I at position 36, M by T at position 36, M by Q at position 36, M by A at position 36, D by Q at position 39, D by H at position 39, D by G at position 39, E by Q at position 42, E by H at position 42, K by Q at position 45, K by T at position 45, K by S at position 45, K by H at position 45, L by V at position 47, L by I at position 47, L by T at position 47, L by, Q at position 47, L by H at position 47, L by A at position 47, K by Q at position 52, K by T at position 52, K by S at position 52, K by H at position 52, F by I at position 67, F by V at position 67, R by H at position 71, R by Q at position 71, D by Q at position 73, D by H at position 73, D by G at position 73, E by Q at position 81, E by H at position 81, E by Q at position 85, E by H at position 85, Y by H at position 92, Y by I at position 92, K by Q at position 99, K by T at position 99, K by S at position 99, K by H at position 99, E by Q at position 103, E by H at position 103, E by Q at position 104, E by H at position 104, K by Q at position 105, K by T at position 105, K by S at position 105, K by H at position 105, E by Q at position 107, E by H at position 107, K by Q at position 108, K by T at position 108, K by S at position 108, K by H at position 108, E by Q at position 109, E by H at position 109, D by Q at position 110, D by H at position 110, D by G at position 110, F by I at position 111, F by V at position 111, R by H at position 113, R by Q at position 113, L by V at position 116, L by I at position 116, L by T at position 116, L by Q at position 116, L by H at position 116, L by A at position 116, L by V at position 120, L by I at position 120, L by T at position 120, L by Q at position 120, L by H at position 120, L by A at position 120, K by Q at position 123, K by T at position 123, K by S at position 123, K by H at position 123, R by H at position 124, R by Q at position 124, R by H at position 128, R by Q at position 128, L by V at position 130, L by I at position 130, L by T at position 130, L by Q at position 130, L by H at position 130, L by A at position 130, K by Q at position 134, K by T at position 134, K by S at position 134, K by H at position 134, K by Q at position 136, K by T at position 136, K by S at position 136, K by H at position 136, E by Q at position 137, E by H at position 137, Y by H at position 138, Y by I at position 138, R by H at position 152, R by Q at position 152, Y by H at position 155, Y by I at position 155, R by H at position 159, R by Q at position 159, Y by H at position 163, Y by I at position 163, R by H at position 165, R by Q at position 165, M by D at position 1, M by E at position 1, M by K at position 1, M by N at position 1, M by R at position 1, M by S at position 1, L by D at position 5, L by E at position 5, L by K at position 5, L by N at position 5, L by R at position 5, L by S at position 5, L by D at position 6, L by E at position 6, L by K at position 6, L by N at position 6, L by R at position 6, L by S at position 6, L by Q at position 6, L by T at position 6, F by E at position 8, F by K at position 8, F by R at position 8, F by D at position 8, L by D at position 9, L by E at position 9, L by K at position 9, L by N at position 9, L by R at position 9, L by S at position 9, Q by D at position 10, Q by E at position 10, Q by K at position 10, Q by N at position 10, Q by R at position 10, Q by S at position 10, Q by T at position 10, S by D at position 12, S by E at position 12, S by K at position 12, S by R at position 12, S by D at position 13, S by E at position 13, S by K at position 13, S by R at position 13, S by N at position 13, S by Q at position 13, S by T at position 13, N by D at position 14, N by E at position 14, N by K at position 14, N by Q at position 14, N by R at position 14, N by S at position 14, N by T at position 14, F by D at position 15, F by E at position 15, F by K at position 15, F by R at position 15, Q by D at position 16, Q by E at position 16, Q by K at position 16, Q by N at position 16, Q by R at position 16, Q by S at position 16, Q by T at position 16, C by D at position 17, C by E at position 17,C by K at position 17, C by N at position 17, C by Q at position 17, C by R at position 17, C by S at position 17, C by T at position 17, L by N at position 20, L by Q at position 20, L by R at position 20, L by S at position 20, L by T at position 20, L by D at position 20, L by E at position 20, L by K at position 20, W by D at position 22, W by E at position 22, W by K at position 22, W by R at position 22, Q by D at position 23, Q by E at position 23, Q by K at position 23, Q by R at position 23, L by D at position 24, L by E at position 24, L by K at position 24, L by R at position 24, W by D at position 79, W by E at position 79, W by K at position 79, W by R at position 79, N by D at position 80, N by E at position 80, N by K at position 80, N by R at position 80, T by D at position 82, T by E at position 82, T by K at position 82, T by R at position 82, I by D at position 83, I by E at position 83, I by K at position 83, I by R at position 83, I by N at position 83, I by Q at position 83, I by S at position 83, I by T at position 83, N by D at position 86, N by E at position 86, N by K at position 86, N by R at position 86, N by Q at position 86, N by S at position 86, N by T at position 86, L by D at position 87, L by E at position 87, L by K at position 87, L by R at position 87, L by N at position 87, L by Q at position 87, L by S at position 87, L by T at position 87, A by D at position 89, A by E at position 89, A by K at position 89, A by R at position 89, N by D at position 90, N by E at position 90, N by K at position 90, N by Q at position 90, N by R at position 90, N by S at position 90, N by T at position 90, V by D at position 91, V by E at position 91, V by K at position 91, V by N at position 91, V by Q at position 91, V by R at position 91, V by S at position 91, V by T at position 91, Q by D at position 94, Q by E at position 94, Q by Q at position 94, Q by N at position 94, Q by R at position 94, Q by S at position 94, Q by T at position 94, I by D at position 95, I by E at position 95, I by K at position 95, I by N at position 95, I by Q at position 95, I by R at position 95, I by S at position 95, I by T at position 95, H by D at position 97, H by E at position 97, H by K at position 97, H by N at position 97, H by Q at position 97, H by R at position 97, H by S at position 97, H by T at position 97, L by D at position 98, L by E at position 98, L by K at position 98, L by N at position 98, L by Q at position 98, L by R at position 98, L by S at position 98, L by T at position 98, V by D at position 101, V by E at position 101, V by K at position 101, V by N at position 101, V by Q at position 101, V by R at position 101, V by S at position 101, V by T at position 101, M by C at position 1, L by C at position 6, Q by C at position 10, S by C at position 13, Q by C at position 16, L by C at position 17, V by C at position 101, L by C at position 98, H by C at position 97, Q by C at position 94, V by C at position 91, or N by C at position 90, or any combination of such replacements, wherein residue 1 corresponds to residue 1 of the mature IFN-β cytokine set forth in SEQ ID NO:197 (as set forth in FIG. 3); where the variant further comprises an amino acid sequence that differs from the amino acid sequence of the parent polypeptide to the extent that the variant comprises one or more glycosylation sites not found in the parent polypeptide.

[0497] In other embodiments, a hyperglycosylated, protease-resistant IFN-β variant (a “modified IFN-β cytokine”) is selected from the group of proteins comprising one or more single amino acid replacements in SEQ ID NO:197, as set forth in FIG. 3, corresponding to the replacement of: D by Q at position 39, D by H at position 39, D by G at position 39, E by Q at position 42, E by H at position 42, K by Q at position 45, K by T at position 45, K by S at position 45, K by H at position 45, L by V at position 47, L by I at position 47, L by T at position 47, L by Q at position 47, L by H at position 47, L by A at position 47, K by Q at position 52, K by T at position 52, K by S at position 52, K by H at position 52, F by I at position 67, F by V at position 67, R by H at position 71, R by Q at position 71, D by H at position 73, D by G at position 73, D by Q at position 73, E by Q at position 81, E by H at position 81, E by Q at position 107, E by H at position 107, K by Q at position 108, K by T at position 108, K by S at position 108, K by H at position 108, E by Q at position 109, E by H at position 109, D by Q at position 110, D by H at position 110, D by G at position 110, F by I at position 111, F by V at position 111, R by H at position 113, R by Q at position 113, L by V at position 116, L by I at position 116, L by T at position 116, L by Q at position 116, L by H at position 116, L by A at position 116, L by V at position 120, L by I at position 120, L by T at position 120, L by Q at position 120, L by H at position 120, L by A at position 120, K by Q at position 123, K by T at position 123, K by S at position 123, K by H at position 123, R by H at position 124, R by Q at position 124, R by H at position 128, R by Q at position 128, L by V at position 130, L by I at position 130, L by T at position 130, L by Q at position 130, L by H at position 130, L by A at position 130, K by Q at position 134, K by T at position 134, K by S at position 134, K by H at position 134, K by Q at position 136, K by T at position 136, K by S at position 136, K by H at position 136, E by Q at position 137, E by H at position 137, Y by H at position 163, Y by I at position 1631, R by H at position 165, or R by Q at position 165, or any combination of such replacements, wherein the first amino acid listed is substituted by the second at the position indicated; where the variant further comprises an amino acid sequence that differs from the amino acid sequence of the parent polypeptide to the extent that the variant comprises one or more glycosylation sites not found in the parent polypeptide.

[0498] In some embodiments, a hyperglycosylated, protease-resistant IFN-β variant (a “modified IFN-β cytokine”) is selected from the group of proteins comprising one or more single amino acid replacements in SEQ ID NO:197, as set forth in FIG. 3, corresponding to the replacement of: M by V at position 1, M by I at position 1, M by T at position 1, M by Q at position 1, M by A at position 1, L by V at position 5, L by I at position 5, L by T at position 5, L by Q at position 5, L by H at position 5, L by A at position 5, F by I at position 8, F by V at position 8, L by V at position 9, L by I at position 9, L by T at position 9, L by Q at position 9, L by H at position 9, L by A at position 9, R by H at position 11, R by Q at position 11, F by I at position 15, F by V at position 15, K by Q at position 19, K by T at position 19, K by S at position 19, K by H at position 19, W by S at position 22, W by H at position 22, N by H at position 25, N by S at position 25, N by Q at position 25, R by H position 27, R by Q position 27, L by V at position 28, L by I at position 28, L by T at position 28, L by Q at position 28, L by H at position 28, L by A at position 28, E by Q at position 29, E by H at position 29, Y by H at position 30, Y by I at position 30, L by V at position 32, L by I at position 32, L by T at position 32, L by Q at position 32, L by H at position 32, L by A at position 32, K by Q at position 33, K by T at position 33, K by S at position 33, K by H at position 33, R by H at position 35, R by Q at position 35, M by V at position 36, M by I at position 36, M by T at position 36, M by Q at position 36, M by A at position 36, D by Q at position 39, D by H at position 39, D by G at position 39, E by Q at position 42, E by H at position 42, K by Q at position 45, K by T at position 45, K by S at position 45, K by H at position 45, L by V at position 47, L by I at position 47, L by T at position 47, L by, Q at position 47, L by H at position 47, L by A at position 47, K by Q at position 52, K by T at position 52, K by S at position 52, K by H at position 52, F by I at position 67, F by V at position 67, R by H at position 71, R by Q at position 71, D by Q at position 73, D by H at position 73, D by G at position 73, E by Q at position 81, E by H at position 81, E by Q at position 85, E by H at position 85, Y by H at position 92, Y by I at position 92, K by O at position 99, K by T at position 99, K by S at position 99, K by H at position 99, E by Q at position 103, E by H at position 103, E by Q at position 104, E by H at position 104, K by Q at position 105, K by T at position 105, K by S at position 105, K by H at position 105, E by Q at position 107, E by H at position 107, K by Q at position 108, K by T at position 108, K by S at position 108, K by H at position 108, E by Q at position 109, E by H at position 109, D by Q at position 110, D by H at position 110,D by G at position 110, F by I at position 111, F by V at position 111, R by H at position 113, R by Q at position 113, L by V at position 116, L by I at position 116, L by T at position 116, L by Q at position 116, L by H at position 116, L by A at position 116, L by V at position 120, L by I at position 120, L by T at position 120, L by Q at position 120, L by H at position 120, L by A at position 120, K by Q at position 123, K by T at position 123, K by S at position 123, K by H at position 123, R by H at position 124, R by Q at position 124, R by H at position 128, R by Q at position 128, L by V at position 130, L by I at position 130, L by T at position 130, L by Q at position 130, L by H at position 130, L by A at position 130, K by Q at position 134, K by T at position 134, K by S at position 134, K by H at position 134, K by Q at position 136, K by T at position 136, K by S at position 136, K by H at position 136, E by Q at position 137, E by H at position 137, Y by H at position 138, Y by I at position 138, R by H at position 152, R by Q at position 152, Y by H at position 155, Y by I at position 155, R by H at position 159, R by Q at position 159, Y by H at position 163, Y by I at position 163, R by H at position 165, R by Q at position 165, M by D at position 1, M by E at position 1, M by K at position 1, M by N at position 1, M by R at position 1, M by S at position 1, L by D at position 5, L by E at position 5, L by K at position 5, L by N at position 5, L by R at position 5, L by S at position 5, L by D at position 6, L by E at position 6, L by K at position 6, L by N at position 6, L by R at position 6, L by S at position 6, L by Q at position 6, L by T at position 6, F by E at position 8, F by K at position 8, F by R at position 8, F by D at position 8, L by D at position 9, L by E at position 9, L by K at position 9, L by N at position 9, L by R at position 9, L by S at position 9, Q by D at position 10, Q by E at position 10, Q by K at position 10, Q by N at position 10, Q by R at position 10, Q by S at position 10, Q by T at position 10, S by D at position 12, S by E at position 12, S by K at position 12, S by R at position 12, S by D at position 13, S by E at position 13, S by K at position 13, S by R at position 13, S by N at position 13, S by Q at position 13, S by T at position 13, N by D at position 14, N by E at position 14, N by K at position 14, N by Q at position 14, N by R at position 14, N by S at position 14, N by T at position 14, F by D at position 15, F by E at position 15, F by K at position 15, F by R at position 15, Q by D at position 16, Q by E at position 16, Q by K at position 16, Q by N at position 16, Q by R at position 16, Q by S at position 16, Q by T at position 16, C by D at position 17, C by E at position 17, C by K at position 17, C by N at position 17, C by Q at position 17, C by R at position 17, C by S at position 17, C by T at position 17, L by N at position 20, L by Q at position 20, L by R at position 20, L by S at position 20, L by T at position 20, L by D at position 20, L by E at position 20, L by K at position 20, W by D at position 22, W by E at position 22, W by K at position 22, W by R at position 22, Q by D at position 23, Q by E at position 23, Q by K at position 23, Q by R at position 23, L by D at position 24, L by E at position 24, L by K at position 24, L by R at position 24, W by D at position 79, W by E at position 79, W by K at position 79, W by R at position 79, N by D at position 80, N by E at position 80, N by K at position 80, N by R at position 80, T by D at position 82, T by E at position 82, T by K at position 82, T by R at position 82, I by D at position 83, I by E at position 83, I by K at position 83, I by R at position 83, I by N at position 83, I by Q at position 83, I by S at position 83, I by T at position 83, N by D at position 86, N by E at position 86, N by K at position 86, N by R at position 86, N by Q at position 86, N by S at position 86, N by T at position 86, L by D at position 87, L by E at position 87, L by K at position 87, L by R at position 87, L by N at position 87, L by Q at position 87, L by S at position 87, L by T at position 87, A by D at position 89, A by E at position 89, A by K at position 89, A by R at position 89, N by D at position 90, N by E at position 90, N by K at position 90, N by Q at position 90, N by R at position 90, N by S at position 90, N by T at position 90, V by D at position 91, V by E at position 91, V by K at position 91, V by N at position 91, V by Q at position 91, V by R at position 91, V by S at position 91, V by T at position 91, Q by D at position 94, Q by E at position 94, Q by Q at position 94, Q by N at position 94, Q by R at position 94, Q by S at position 94, Q by T at position 94, I by D at position 95, I by E at position 95, I by K at position 95, Iby N at position 95, I by Q at position 95, I by R at position 95, I by S at position 95, I by T at position 95, H by D at position 97, H by E at position 97, H by K at position 97, H by N at position 97, H by Q at position 97, H by R at position 97, H by S at position 97, H by T at position 97, L by D at position 98, L by E at position 98, L by K at position 98, L by N at position 98, L by Q at position 98, L by R at position 98, L by S at position 98, L by T at position 98, V by D at position 101, V by E at position 101, V by K at position 101, V by N at position 101, V by Q at position 101, V by R at position 101, V by S at position 101, V by T at position 101, M by C at position 1, L by C at position 6, Q by C at position 10, S by C at position 13, Q by C at position 16, L by C at position 17, V by C at position 101, L by C at position 98, H by C at position 97, Q by C at position 94, V by C at position 91, N by C at position 90, D by Q at position 39, D by H at position 39, D by G at position 39, E by Q at position 42, E by H at position 42, K by Q at position 45, K by T at position 45, K by S at position 45, K by H at position 45, L by V at position 47, L by I at position 47, L by T at position 47, L by Q at position 47, L by H at position 47, L by A at position 47, K by Q at position 52, K by T at position 52, K by S at position 52, K by H at position 52, F by I at position 67, F by V at position 67, R by H at position 71, R by Q at position 71, D by H at position 73, D by G at position 73, D by Q at position 73, E by Q at position 81, E by H at position 81, E by Q at position 107, E by H at position 107, K by Q at position 108, K by T at position 108, K by S at position 108, K by H at position 108, E by Q at position 109, E by H at position 109, D by Q at position 110, D by H at position 110, D by G at position 110, F by I at position 111, F by V at position 111, R by H at position 113, R by Q at position 113, L by V at position 116, L by I at position 116, L by T at position 116, L by Q at position 116, L by H at position 116, L by A at position 116, L by V at position 120, L by I at position 120, L by T at position 120, L by Q at position 120, L by H at position 120, L by A at position 120, K by Q at position 123, K by T at position 123, K by S at position 123, K by H at position 123, R by H at position 124, R by Q at position 124, R by H at position 128, R by Q at position 128, L by V at position 130, L by I at position 130, L by T at position 130, L by Q at position 130, L by H at position 130, L by A at position 130, K by Q at position 134, K by T at position 134, K by S at position 134, K by H at position 134, K by Q at position 136, K by T at position 136, K by S at position 136, K by H at position 136, E by Q at position 137, E by H at position 137, Y by H at position 163, Y by I at position 163, R by H at position 165, or R by Q at position 165, or any combination of such replacements, wherein the first amino acid listed is substituted by the second at the position indicated; where the variant further comprises an amino acid sequence that differs from the amino acid sequence of the parent polypeptide to the extent that the variant comprises one or more glycosylation sites not found in the parent polypeptide.

[0499] In particular embodiments, a hyperglycosylated, protease-resistant IFN-β variant (a “modified IFN-β cytokine”) is selected from the group consisting of a modified IFN-β comprising an amino acid sequence as depicted in any of SEQ ID Nos.234-289, and 989-1302; where the variant further comprises an amino acid sequence that differs from the amino acid sequence of the parent polypeptide to the extent that the variant comprises one or more glycosylation sites not found in the parent polypeptide.

[0500] In particular embodiments, a hyperglycosylated, protease-resistant IFN-β variant (a “modified IFN-βcytokine”) comprises one or more of the amino acid replacements set forth in Table 2 (IFN-β); where the variant further comprises an amino acid sequence that differs from the amino acid sequence of the parent polypeptide to the extent that the variant comprises one or more glycosylation sites not found in the parent polypeptide.

TABLE 2
(IFN-β)

| | |
|---|---|
| 1. | D39Q |
| 2. | D39N |
| 3. | E42Q |
| 4. | E42N |
| 5. | E42H |
| 6. | K45Q |
| 7. | K45N |
| 8. | L47V |
| 9. | L47I |
| 10. | K52Q |
| 11. | K52N |
| 12. | F67I |
| 13. | F67V |
| 14. | R71H |
| 15. | R71Q |
| 16. | D73Q |
| 17. | D73N |
| 18. | E81Q |
| 19. | E81N |
| 20. | E81H |
| 21. | E107Q |
| 22. | E107N |
| 23. | E107H |
| 24. | K108Q |
| 25. | K108N |
| 26. | E109Q |
| 27. | E109N |
| 28. | E109H |
| 29. | D110Q |
| 30. | D110N |
| 31. | F111I |
| 32. | F111V |
| 33. | R113H |
| 34. | R113Q |
| 35. | L116V |
| 36. | L116I |
| 37. | L120V |
| 38. | L120I |
| 39. | K123Q |
| 40. | K123N |
| 41. | R124H |
| 42. | R124Q |
| 43. | R128H |
| 44. | R128Q |
| 45. | L130V |
| 46. | L130I |
| 47. | K134Q |
| 48. | K134N |
| 49. | K136Q |
| 50. | K136N |
| 51. | E137Q |
| 52. | E137N |
| 53. | E137H |
| 54. | Y163H |
| 55. | Y163I |
| 56. | R165H |
| 57. | R165Q |

[0501] In some embodiments, any of the above-described protease-resistant or protease-resistant, hyperglycosylated IFN-β variants is a variant of IFN-β1 a, and the variant is an [S99N]IFN-β1a glycopeptide, where the [S99N]IFN-β1a glycopeptide is a variant of IFN-β1a having (a) an asparagine residue substituted for the native serine residue at amino acid position 99 in the anino acid sequence of IFN-β1a (where the S99 amino acid position is as set forth in FIG. 24; and corresponds to S74 in the IFN-β amino acid sequence set forth in FIG. 3); and (b) a carbohydrate moiety covalently attached to the R-group of said asparagine residue.

[0502] In some embodiments, any of the above-described protease-resistant or protease-resistant, hyperglycosylated IFN-β variants is a variant of IFN-β1a, and the variant is an [S99N, E134N]IFN-β1a glycopeptide, where the [S99N, E134N]IFN-β1a glycopeptide is a variant of IFN-β1a having (a) an asparagine residue substituted for each of the native serine and glutanic acid residues at amino acid positions 99 and 134, respectively, in the amino acid sequence of IFN-β1a (where the S99 and E134 amino acid positions are as set forth in FIG. 24; and correspond to S74 and E109, respectively, in the IFN-β amino acid sequence set forth in FIG. 3); and (b) a carbohydrate moiety covalently attached to the R-group of each of said asparagine residues.

[0503] In some embodiments, any of the above-described protease-resistant or protease-resistant, hyperglycosylated IFN-β variants is a variant of IFN-β1a, and the variant is an [S99N, E134N, F136T]IFN-β1a glycopeptide, where the [S99N, E134N, F136T]IFN-β1a glycopeptide is a variant of IFN-β1a having (a) asparagine, asparagine and threonine residues substituted for the native serine, glutamic acid and phenylalanine residues at amino acid positions 99, 134 and 136, respectively, in the amino acid sequence of IFN-β1a (where the S99, E134, and F136 amino acid positions are as set forth in FIG. 24; and correspond to S74, E109, and F111, respectively, in the IFN-β amino acid sequence set forth in FIG. 3); and (b) a carbohydrate moiety covalently attached to the R-group of each of said asparagine residues.

[0504] In some embodiments, any of the above-described protease-resistant or protease-resistant, hyperglycosylated IFN-β variants is a variant of IFN-β1a, and the variant is an [E134N]IFN-β1a glycopeptide, where the [E134N]IFN-β1a glycopeptide is a variant of IFN-β1a having (a) an asparagine residue substituted for the native glutamic acid residue at amino acid position 134 in the amino acid sequence of IFNβ1a (where the amino acid positions are as set forth in FIG. 24); and (b) a carbohydrate moiety covalently attached to the R-group of said asparagine residue.

[0505] In some embodiments, any of the above-described protease-resistant or protease-resistant, hyperglycosylated IFN-β variants is a variant of IFN-β1a, and the variant is an [E134N, F136T]IFN-β1a glycopeptide, where the [E134N, F136T]IFN-β1a glycopeptide is a variant of IFN-β1a having (a) asparagine and threonine residues substituted for the native glutamic acid and phenylalanine residues at amino acid positions 134 and 136, respectively, in the amino acid sequence of IFN-β1a (where the amino acid positions are as set forth in FIG. 24); and (b) a carbohydrate moiety covalently attached to the R-group of said asparagine residue.

[0506] In some embodiments, any of the above-described protease-resistant or protease-resistant, hyperglycosylated IFN-β variants is a variant of IFN-β1a, and the variant is an [E134T]IFN-β1a glycopeptide, where the [E134T]IFN-β1a glycopeptide is a variant of IFN-β1a having (a) a threonine residue substituted for the native glutamic acid residue at amino acid position 134 in the amino acid sequence of IFN-β1a (where the amino acid positions are as set forth in FIG. 24); and (b) a carbohydrate moiety covalently attached to the R-group of said threonine residue.

[0507] In some embodiments, any of the above-described protease-resistant or protease-resistant, hyperglycosylated IFN-β variants is a variant of IFN-β1a, and the variant is an [S99N, E134T]IFN-β1a glycopeptide, where the [S99N, E134T]IFN-β1a glycopeptide is a variant of IFN-β1a having (a) asparagine and threonine residues substituted for the native serine and glutamic acid residues at amino acid positions 99 and 134, respectively, in the amino acid sequence of IFN-β1a (where the amino acid positions are as set forth in FIG. 24); and (b) a carbohydrate moiety covalently attached to the R-group of each of said asparagine and threonine residues.

[0508] In some embodiments, any of the above-described protease-resistant or protease-resistant, hyperglycosylated IFN-β variants is a variant of IFN-β1b, and the variant is an [S99N]IFN-β1b glycopeptide, where the [S99N]IFN-β1b glycopeptide is a variant of IFN-β1b having (a) an asparagine residue substituted for the native serine residue at amino acid position 99 in the amino acid sequence of IFN-β1b (where the amino acid positions are as set forth in FIG. 24); and (b) a carbohydrate moiety covalently attached to the R-group of said asparagine residue.

[0509] In some embodiments, any of the above-described protease-resistant or protease-resistant, hyperglycosylated IFN-β variants is a variant of IFN-β1b, and the variant is an [S99N, E134N]IFN-β1b glycopeptide, where the [S99N, E134N]IFN-β1b glycopeptide is a variant of IFN-β1b having (a) an asparagine residue substituted for the native serine residue and glutamic acid residue at amino acid positions 99 and 134, respectively, in the amino acid sequence of IFN-β1b (where the amino acid positions are as set forth in FIG. 24); and (b) a carbohydrate moiety covalently attached to the R-group of each of said asparagine residues.

[0510] In some embodiments, any of the above-described protease-resistant or protease-resistant, hyperglycosylated IFN-β variants is a variant of IFN-β1b, and the variant is an [S99N, E134N, F136T]IFN-β1b glycopeptide, where the [S99N, E134N, F136T]IFN-β1b glycopeptide is a variant of IFN-β1b having (a) asparagine, asparagine and threonine residues substituted for the native serine, glutamic acid and phenylalanine residues at amino acid positions 99, 134 and 136, respectively, in the amino acid sequence of IFN-β1b (where the amino acid positions are as set forth in FIG. 24); and (b) a carbohydrate moiety covalently attached to the R-group of each of said asparagine residues.

[0511] In some embodiments, any of the above-described protease-resistant or protease-resistant, hyperglycosylated IFN-β variants is a variant of IFN-β1b, and the variant is an [E134N]IFN-β1b glycopeptide, where the [E134N]IFN-β1b glycopeptide is a variant of IFN-β1b having (a) an asparagine residue substituted for the native glutamic acid residue at amino acid position 134 in the amino acid sequence of IFN-β1b (where the amino acid positions are as set forth in FIG. 24); and (b) a carbohydrate moiety covalently attached to the R-group of said asparagine residue.

[0512] In some embodiments, any of the above-described protease-resistant or protease-resistant, hyperglycosylated IFN-β variants is a variant of IFN-β1b, and the variant is an [E134N, F136T]IFN-β1b glycopeptide, where the [E134N, F136T]IFN-β1b glycopeptide is a variant of IFN-β1b having (a) asparagine and threonine residues substituted for the native glutamic acid and phenylalanine residues at amino acid positions 134 and 136, respectively, in the amino acid sequence of IFN-β1b (where the amino acid positions are as set forth in FIG. 24); and (b) a carbohydrate moiety covalently attached to the R-group of said asparagine residue.

[0513] In some embodiments, any of the above-described protease-resistant or protease-resistant, hyperglycosylated IFN-β variants is a variant of IFN-β1b, and the variant is an [E134T]IFN-β1b glycopeptide, where the [E134T]IFN-β1b glycopeptide is a variant of IFN-β1b having (a) a threonine residue substituted for the native glutamic acid residue at amino acid position 134 in the amino acid sequence of IFN-β1b (where the amino acid positions are as set forth in FIG. 24); and (b) a carbohydrate moiety covalently attached to the R-group of said threonine residue.

[0514] In some embodiments, any of the above-described protease-resistant or protease-resistant, hyperglycosylated IFN-β variants is a variant of IFN-β1b, and the variant is an [S99N, E134T]IFN-β1b glycopeptide, where the [S99N, E134T]IFN-β1b glycopeptide is a variant of IFN-β1b having (a) asparagine and threonine residues substituted for the native serine and glutamic acid residues at amino acid positions 99 and 134, respectively, in the amino acid sequence of IFN-β1b (where the amino acid positions are as set forth in FIG. 24); and (b) a carbohydrate moiety covalently attached to the R-group of each of said asparagine and threonine residues.

IFN-γ Polypeptide Variants

[0515] In other embodiments, the hyperglycosylated, protease-resistant interferon variant is a modified IFN-γ cytokine, comprising one or more amino acid replacements at one or more target positions in SEQ ID NO:199 (as set forth in FIG. 4) corresponding to a structurally-related modified amino acid position within the 3-dimensional structure of an above-described IFN-α2b polypeptide variant, where the replacement(s) lead to greater resistance to proteases, as assessed by incubation with a protease or with a blood lysate or by incubation with serum (as described above), compared to the unmodified IFN-γ. In some of these embodiments, the modified IFN-γ is selected from among proteins comprising one or more single amino acid replacements at one or more target positions in SEQ ID NO: 199 (as set forth in FIG. 4), corresponding to any of amino acid positions: 33, 37, 40, 41, 42, 58, 61, 64, 65 and 66, where the mutations include insertions, deletions and replacements of the native amino acid residue(s). In particular embodiments, the replacements are selected from among amino acid substitutions in SEQ ID NO:199 set forth in Table 3, below, where the first amino acid listed is substituted by the second amino acid at the position indicated; and where the variant further comprises an amino acid sequence that differs from the amino acid sequence of the parent polypeptide to the extent that the variant comprises one or more glycosylation sites not found in the parent polypeptide.

TABLE 3

| | |
|---|---|
| 1. | L33V |
| 2. | L33I |
| 3. | K37Q |
| 4. | K37N |
| 5. | K40Q |
| 6. | K40N |
| 7. | E41Q |
| 8. | E41N |
| 9. | E41H |
| 10. | E42Q |
| 11. | E42N |
| 12. | E42H |
| 13. | K58Q |
| 14. | K58N |
| 15. | K61Q |
| 16. | K61N |
| 17. | K64Q |
| 18. | K64N |
| 19. | D65Q |
| 20. | D65N |
| 21. | D66Q |

[0516] In other embodiments, the modified IFN-γ comprises an amino acid sequence corresponding to any of SEQ ID NOS: 290-311, and further comprises one or more glycosylation sites not found in the parent polypeptide.

[0517] In some embodiments, any of the above-described protease-resistant or protease-resistant, hyperglycosylated IFN-γ variants is an [S99T]IFN-gamma glycopeptide, where the [S99T]IFN-gamma glycopeptide is a variant of the mature, native IFN-gamma having (a) a threonine residue substituted for the native serine residue at amino acid position 99 in the amino acid sequence of IFN-gamma depicted in FIG. 31 (corresponding to S102 of the IFN-γ amino acid sequence set forth in FIG. 4); and (b) a carbohydrate moiety covalently attached to the R-group of the asparagine residue at amino acid position 97 in the amino acid sequence of (a); and comprising at least one mutated protease cleavage site in place of a native protease cleavage site found in the parent IFN-γ polypeptide.

[0518] Since the glycosylation site formed by N97, Y98, T99 in the [S99T]IFN-gamma variant is different than the glycosylation site formed by N97, Y98, S99 in native IFN-gamma, the N97, Y98, T99 glycosylation site qualifies as a non-native glycosylation site not found in the parent polypeptide. In addition, as described in WO 02/081507, the S99T substitution in the amino acid sequence of native IFN-gamma provides for greater efficiency of glycosylation at the N97, Y98, T99 glycosylation site in the [S99T]IFN-gamma variant compared to the efficiency of glycosylation at the N97, Y98, S99 glycosylation site in native IFN-gamma. Thus, [S99T]IFN-gamma qualifies as a hyperglycosylated polypeptide variant of the parent IFN-gamma polypeptide (where the N97, Y98, and S99 amino acid positions in the IFN-γ amino acid sequence set forth in FIG. 31 correspond to N100, Y101, and S102 in the IFN-γ amino acid sequence set forth in FIG. 4).

[0519] In some embodiments, any of the above-described protease-resistant or protease-resistant, hyperglycosylated IFN-γ variants is an [E38N]IFN-gamma glycopeptide, where the [E38N]IFN-gamma glycopeptide is a variant of the mature, native IFN-gamma having (a) an asparagine residue substituted for the native glutamic acid residue at amino acid position 38 in the amino acid sequence of IFN-gamma depicted in FIG. 31 (where amino acid E38 in the IFN-γ amino acid sequence set forth in FIG. 31 corresponds to E41 of the IFN-γ amino acid sequence set forth in FIG. 4); and (b) a carbohydrate moiety covalently attached to the R-group of the asparagine residue at amino acid position 38 in the amino acid sequence of (a); and comprising at least one mutated protease cleavage site in place of a native protease cleavage site found in the parent IFN-γ polypeptide.

[0520] In some embodiments, any of the above-described protease-resistant or protease-resistant, hyperglycosylated IFN-γ variants is an [E38N, S99T]IFN-gamma glycopeptide, where the [E38N, S99T]IFN-gamma glycopeptide is a variant of the mature, native IFN-gamma having (a) asparagine and threonine residues substituted for the native glutamic acid and serine residues at amino acid positions 38 and 99 in the amino acid sequence of IFN-gamma depicted in FIG. 31 (where amino acids E38 and S99 in the IFN-γ amino acid sequence set forth in FIG. 31 correspond to E41 and S102, respectively, of the IFN-γ amino acid sequence set forth in FIG. 4); and (b) a carbohydrate moiety covalently attached to the R-group of the asparagine residue at each of amino acid positions 38 and 97 in the amino acid sequence of (a); and comprising at least one mutated protease cleavage site in place of a native protease cleavage site found in the parent IFN-γ polypeptide.

[0521] In some embodiments, any of the above-described protease-resistant or protease-resistant, hyperglycosylated IFN-γ variants is an [E38N, S40T]IFN-gamma glycopeptide, where the [E38N, S40T]IFN-gamma glycopeptide is a variant of the mature, native IFN-gamma having (a) asparagine and threonine residues substituted for the native glutamic acid and serine residues at amino acid positions 38 and 40 in the amino acid sequence of IFN-gamma depicted in FIG. 31 (where amino acids E38 and S40 in the IFN-γ amino acid sequence set forth in FIG. 31 correspond to E41 and S43, respectively, of the IFN-γ amino acid sequence set forth in FIG. 4); and (b) a carbohydrate moiety covalently attached to the R-group of the asparagine residue at amino acid position 38 in the amino acid sequence (a); and comprising at least one mutated protease cleavage site in place of a native protease cleavage site found in the parent IFN-γ polypeptide.

[0522] In some embodiments, any of the above-described protease-resistant or protease-resistant, hyperglycosylated IFN-γ variants is an [E38N, S40T, S99T]IFN-gamma glycopeptide, where the [E38N, S40T, S99T]IFN-gamma glycopeptide is a variant of the mature, native IFN-gamma having (a) asparagine, threonine and threonine residues substituted for the native glutamic acid, serine and serine residues at amino acid positions 38, 40 and 99, respectively, in the amino acid sequence of IFN-gamma depicted in FIG. 31 (where amino acids E38, S40, and S99 in the IFN-γ amino acid sequence set forth in FIG. 31 correspond to E41, S43, and S 102, respectively, of the IFN-γ amino acid sequence set forth in FIG. 4); and (b) a carbohydrate moiety covalently attached to the R-group of the asparagine residue at amino acid position 38 in the amino acid sequence of (a), and optionally further having (c) a carbohydrate moiety covalently attached to the R-group of the asparagine residue at amino acid position 97 in the amino acid sequence of (a); and comprising at least one mutated protease cleavage site in place of a native protease cleavage site found in the parent IFN-γ polypeptide.

[0523] In some embodiments, any of the above-described hyperglycosylated, protease-resistant IFN-γ variants has increased stability compared to the unmodified (parent) cytokine, where the stability is assessed by measuring residual biological activity after incubation with either a mixture of proteases, individual proteases, blood lysate, or serum, as described above. In other embodiments, any of the above-described protease-resistant IFN-γ variants has increased biological activity compared to the unmodified (parent) cytokine, after incubation with either a mixture of proteases, individual proteases, blood lysate, or serum, as described above.

Erythropoietin Polypeptide Variants

[0524] In other embodiments, the hyperglycosylated, protease-resistant cytokine variant is a modified erythropoietin cytokine, comprising one or more amino acid replacements at one or more target positions in SEQ ID NO:201 (as set forth in FIG. 7) corresponding to a structurally-related modified amino acid position within the 3-dimensional structure of an above-described IFN-α2b polypeptide variant, where the replacement(s) lead to greater resistance to proteases, as assessed by incubation with a protease or with a blood lysate or by incubation with serum (as described above), compared to the unmodified erythropoietin. In some of these embodiments, the modified erythropoietin is selected from among proteins comprising one or more single amino acid replacements at one or more target positions in SEQ ID NO: 201 (as set forth in FIG. 7), corresponding to any of amino acid positions: 43, 45, 48, 49, 52, 53, 55, 72, 75, 76, 123, 129, 130, 131, 162, and 165, where the mutations include insertions, deletions and replacements of the native amino acid residue(s). In particular embodiments, the replacements are selected from among amino acid substitutions in SEQ ID NO:201, set forth in Table 4, below, where the first amino acid listed is substituted by the second amino acid at the position indicated; and where the variant further comprises an amino acid sequence that differs from the amino acid sequence of the parent polypeptide to the extent that the variant comprises one or more glycosylation sites not found in the parent polypeptide.

TABLE 4

| | |
|---|---|
| 1. | D43Q |
| 2. | D43N |
| 3. | K45Q |
| 4. | K45N |
| 5. | F48I |
| 6. | F48V |
| 7. | Y49H |
| 8. | Y49I |
| 9. | K52Q |
| 10. | K52N |
| 11. | R53H |
| 12. | R53Q |
| 13. | E55Q |
| 14. | E55N |
| 15. | E55H |
| 16. | E72Q |
| 17. | E72N |
| 18. | E72H |
| 19. | L75V |
| 20. | L75I |
| 21. | R76H |
| 22. | R76Q |
| 23. | D123Q |
| 24. | D123N |
| 25. | P129S |
| 26. | P129A |
| 27. | L130V |
| 28. | L130I |
| 29. | R131H |
| 30. | R131Q |
| 31. | R162H |
| 32. | R162Q |
| 33. | D165Q |
| 34. | D165N |
| 35. | P121S |
| 36. | P121A |
| 37. | P122S |
| 38. | P122A |

[0525] In other embodiments, the modified erythropoietin comprises an amino acid sequence corresponding to any of SEQ ID NOS: 940-977, and further comprises one or more glycosylation sites not found in the parent polypeptide.

GM-CSF Polypeptide Variants

[0526] In other embodiments, hyperglycosylated, the protease-resistant cytokine variant is a modified GM-CSF cytokine, comprising one or more amino acid replacements at one or more target positions in SEQ ID NO:202 (as set-forth in FIG. 8) corresponding to a structurally-related modified amino acid position within the 3-dimensional structure of an above-described erythropoietin polypeptide variant, where the replacement(s) lead to greater resistance to proteases, as assessed by incubation with a protease or with a blood lysate or by incubation with serum (as described above), compared to the unmodified GM-CSF. In some of these embodiments, the modified GM-CSF is selected from among proteins comprising one or more single amino acid replacements at one or more target positions in SEQ ID NO: 202 (as set forth in FIG. 8), corresponding to any of amino acid positions: 38, 41, 45, 46, 48, 49, 51, 60, 63, 67, 92, 93, 119, 120, 123, and 124, where the mutations include insertions, deletions and replacements of the native amino acid residue(s). In particular embodiments, the replacements are selected from among amino acid substitutions in SEQ ID NO:202, set forth in Table 5, below, where the first amino acid listed is substituted by the second amino acid at the position indicated; where the variant further comprises an amino acid sequence that differs from the amino acid sequence of the parent polypeptide to the extent that the variant comprises one or more glycosylation sites not found in the parent polypeptide.

TABLE 5

| | |
|---|---|
| 1. | E38Q |
| 2. | E38N |
| 3. | E38H |
| 4. | E41Q |
| 5. | E41N |
| 6. | E41H |
| 7. | E45Q |
| 8. | E45N |
| 9. | E45H |
| 10. | M46V |
| 11. | M46I |
| 12. | D48Q |
| 13. | D48N |
| 14. | L49V |
| 15. | L49I |
| 16. | E51Q |
| 17. | E51N |
| 18. | E51H |
| 19. | E60Q |
| 20. | E60N |
| 21. | E60H |
| 22. | K63Q |
| 23. | K63N |
| 24. | R67H |
| 25. | R67Q |
| 26. | P92S |
| 27. | P92A |
| 28. | E93Q |
| 29. | E93N |
| 30. | E93H |
| 31. | F119I |
| 32. | F119V |
| 33. | D120Q |
| 34. | D120N |
| 35. | E123Q |
| 36. | E123N |
| 37. | E123H |
| 38. | P124S |
| 39. | P124A |

[0527] In other embodiments, the modified GM-CSF comprises an amino acid sequence corresponding to any of SEQ ID NOs: 362-400, and further comprises one or more glycosylation sites not found in the parent polypeptide.

G-CSF Polypeptide Variants

[0528] In other embodiments, the hyperglycosylated, protease-resistant cytokine variant is a modified G-CSF cytokine, comprising one or more amino acid replacements at one or more target positions in SEQ ID NO:210 (as set forth in FIG. 5) corresponding to a structurally-related modified amino acid position within the 3-dimensional structure of an above-described IFN-α2b polypeptide variant, where the replacement(s) lead to greater resistance to proteases, as assessed by incubation with a protease or with a blood lysate or by incubation with serum (as described above), compared to the unmodified G-CSF. In some of these embodiments, the modified G-CSF is selected from among proteins comprising one or more single amino acid replacements at one or more target positions in SEQ ID NO:210 (as set forth in FIG. 5), corresponding to any of amino acid positions: 61, 63, 68, 72, 86, 96, 100, 101, 131, 133, 135, 147, 169, 172, and 177, where the mutations include insertions, deletions and replacements of the native amino acid residue(s). In particular embodiments, the replacements are selected from among amino acid substitutions in SEQ ID NO:210, set forth in Table 6, below, where the first amino acid listed is substituted by the second amino acid at the position indicated; where the variant further comprises an amino acid sequence that differs from the amino acid sequence of the parent polypeptide to the extent that the variant comprises one or more glycosylation sites not found in the parent polypeptide.

TABLE 6

| | |
|---|---|
| 1. | W61S |
| 2. | W61H |
| 3. | P63S |
| 4. | P63A |
| 5. | P68S |
| 6. | P68A |
| 7. | L72V |
| 8. | L72I |
| 9. | F86I |
| 10. | F86V |
| 11. | E96Q |
| 12. | E96N |
| 13. | E96H |
| 14. | P100S |
| 15. | P100A |
| 16. | E101Q |
| 17. | E101N |
| 18. | E101H |
| 19. | P131S |
| 20. | P131A |
| 21. | L133V |
| 22. | L133I |
| 23. | P135S |
| 24. | P135A |
| 25. | F147I |
| 26. | F147V |
| 27. | R169H |
| 28. | R169Q |
| 29. | R172H |
| 30. | R172Q |
| 31. | P177S |
| 32. | P177A |

[0529] In other embodiments, the modified G-CSF comprises an amino acid sequence corresponding to any of SEQ ID NOs: 631-662, and further comprises one or more glycosylation sites not found in the parent polypeptide.

Human Growth Hormone polypeptide Variants

[0530] In other embodiments, the hyperglycosylated, protease-resistant cytokine variant is a modified human growth hormone (hGH) cytokine, comprising one or more amino acid replacements at one or more target positions in SEQ ID NO:1405 (as set forth in FIG. 6) corresponding to a structurally-related modified amino acid position within the 3-dimensional structure of an above-described G-CSF polypeptide variant, where the replacement(s) lead to greater resistance to proteases, as assessed by incubation with a protease or with a blood lysate or by incubation with serum (as described above), compared to the unmodified hGH. In some of these embodiments, the modified hGH is selected from among proteins comprising one or more single amino acid replacements at one or more target positions in SEQ ID NO: 1405 (as set forth in FIG. 6), corresponding to any of amino acid positions: 56, 59, 64, 65, 66, 88, 92, 94, 101, 129, 130, 133, 134, 140, 143, 145, 146, 147, 183, and 186, where the mutations include insertions, deletions and replacements of the native amino acid residue(s). In particular embodiments, the replacements are selected from among amino acid substitutions in SEQ ID NO:201, set forth in Table 7, below, where the first amino acid listed is substituted by the second amino acid at the position indicated; where the variant further comprises an amino acid sequence that differs from the amino acid sequence of the parent polypeptide to the extent that the variant comprises one or more glycosylation sites not found in the parent polypeptide.

TABLE 7

| | |
|---|---|
| 1. | E56Q |
| 2. | E56N |
| 3. | E56H |
| 4. | P59S |
| 5. | P59A |
| 6. | R64H |
| 7. | R64Q |
| 8. | E65Q |
| 9. | E65N |
| 10. | E65H |
| 11. | E66Q |
| 12. | E66N |
| 13. | E66H |
| 14. | E88Q |
| 15. | E88N |
| 16. | E88H |
| 17. | F92I |
| 18. | F92V |
| 19. | R94H |
| 20. | R94Q |
| 21. | L101V |
| 22. | L101I |
| 23. | E129Q |
| 24. | E129N |
| 25. | E129H |
| 26. | D130Q |
| 27. | D130N |
| 28. | P133S |
| 29. | P133A |
| 30. | R134H |
| 31. | R134Q |
| 32. | K140Q |
| 33. | K140N |
| 34. | Y143H |
| 35. | Y143I |
| 36. | K145Q |
| 37. | K145N |
| 38. | F146I |
| 39. | F146V |
| 40. | D147Q |
| 41. | D147N |
| 42. | R183H |
| 43. | R183Q |
| 44. | E186Q |
| 45. | E186N |
| 46. | E186H |

[0531] In other embodiments, the modified hGH comprises an amino acid sequence corresponding to any of SEQ ID NOs: 850-895, and fturther comprises one or more glycosylation sites not found in the parent polypeptide.

[0532] In other embodiments, the hyperglycosylated, protease-resistant cytokine variant is a modified cytokine that exhibits greater resistance to proteolysis, compared to a corresponding unmodified (parent) cytokine, where the modified cytokine comprises one or more amino acid replacements at one or more target positions on the cytokine corresponding to a structurally-related modified amino acid position within the 3-dimensional structure of an above-described IFN-β polypeptide variant. The amino acid replacement(s) lead to greater resistance to proteolysis, compared to the unmodified (parent) cytokine. Increased resistance to proteolysis is assessed by incubation with a protease or with a blood lysate or by incubation with serum (as described above), compared to the unmodified hGH.

Additional Modifications

[0533] Typically, a protease-resistant or protease-resistant, hyperglycosylated polypeptide variant will have an amino acid sequence that is substantially similar to the amino acid sequence of a parent polypeptide. For example, a hyperglycosylated, protease-resistant polypeptide variant can have an amino acid sequence that differs by at least one amino acid, and may differ by at least two but not more than about ten amino acids, compared to the amino acid sequence of a parent polypeptide. The sequence changes may be substitutions, insertions or deletions. Scanning mutations that systematically introduce alanine, or other residues, may be used to determine key amino acids. Specific amino acid substitutions of interest include conservative and non-conservative changes. Conservative amino acid substitutions typically include substitutions within the following groups: (glycine, alanine); (valine, isoleucine, leucine); (aspartic acid, glutamic acid); (asparagine, glutamine); (serine, threonine); (lysine, arginine); or (phenylalanine, tyrosine).

[0534] Additional modifications of interest that may or may not alter the primary amino acid sequence of a parent protein therapeutic include chemical derivatization of polypeptides, e.g., acetylation, or carboxylation; changes in amino acid sequence that make the protein susceptible to PEGylation; and the like. A hyperglycosylated, protease-resistant polypeptide variant may be modified with one or more polyethylene glycol moieties (PEGylated). In one embodiment, the invention contemplates the use of polypeptide variants with one or more non-naturally occurring pegylation sites that are engineered to provide PEG-derivatized polypeptides with reduced serum clearance. Also embraced are sequences that have phosphorylated amino acid residues, e.g., phosphotyrosine, phosphoserine, or phosphothreonine.

[0535] Also suitable for use in connection with the present invention are polypeptides that have been modified using ordinary chemical techniques so as to improve their resistance to proteolytic degradation, to optimize solubility properties, or to render them more suitable as a therapeutic agent. For examples, the backbone of the peptide may be cyclized to enhance stability (see, for example, Friedler et al. 2000, J Biol. Chem. 275:23783-23789). Analogs may be used that include residues other than naturally occurring L-amino acids, e.g., D-amino acids or non-naturally occurring synthetic amino acids. The protein may be pegylated to enhance stability.

[0536] Modifications of interest that may or may not alter the primary amino acid sequence include chemical derivatization of polypeptides, e.g., acetylation, or carboxylation; changes in amino acid sequence that make the protein susceptible to PEGylation (addition of a polyethylene glycol moiety); and the like. In one embodiment, the invention contemplates the use of synthetic Type I interferon receptor agonist variants, hyperglycosylated, protease-resistant polypeptide variants that further include one or more non-naturally occurring pegylation sites that are engineered to provide PEG-derivatized polypeptides with reduced serum clearance. Thus, the invention includes PEGylated synthetic Type I interferon receptor polypeptide agonist. Also included are modifications of glycosylation, e.g., those made by modifying the glycosylation patterns of a polypeptide during its synthesis and processing or in further processing steps; e.g., by exposing the polypeptide to enzymes that affect glycosylation, such as mammalian glycosylating or deglycosylating enzymes. The invention contemplates the use of any PEGylated hyperglycosylated, PEGylated protease-resistant and PEGylated preotease-resistent hyperglycosylated polypeptide variants. Also embraced are sequences that have phosphorylated amino acid residues, e.g., phosphotyrosine, phosphoserine, or phosphothreonine.

Fusion Proteins

[0537] In some embodiments, a hyperglycosylated, protease-resistant polypeptide variant further comprises a heterologous polypeptide (e.g., a fusion partner) to form a fusion protein. Suitable fusion partners include peptides and polypeptides that confer enhanced stability in vivo (e.g., enhanced serum half-life); provide ease of purification, e.g., (His)ₙ, e.g., 6His, and the like; provide for secretion of the fusion protein from a cell; provide an epitope tag, e.g., GST, hemagglutinin (HA; e.g., CYPYDVPDYA; SEQ ID NO:1304), FLAG (e.g., DYKDDDDK; SEQ ID NO:1305), c-myc (e.g., CEQKLISEEDL; SEQ ID NO:1306), and the like; provide a detectable signal, e.g., an enzyme that generates a detectable product (e.g., β-galactosidase, luciferase), or a protein that is itself detectable, e.g., a green fluorescent protein, etc.; provides for multimerization, e.g., a multimerization domain such as an Fc portion of an immunoglobulin; and the like.

[0538] A fusion protein may comprise an amino acid sequence that provides for secretion of the fusion protein from the cell. Those skilled in the art are aware of such secretion signal sequences. Secretion signals that are suitable for use in bacteria include, but are not limited to, the secretion signal of Braun's lipoprotein of E. coli, S. marcescens, E. amylosora, M morganii, and P. mirabilis, the TraT protein of E. coli and Salmonella; the penicillinase (PenP) protein of B. licheniformis and B. cereus and S. aureus; pullulanase proteins of Klebsiella pneumoniae and Klebsiella aerogenese; E. coli lipoproteins 1pp- 28, Pal, RplA, Rp1B, OsmB, NIpB, and Orl17; chitobiase protein of V harseyi; the β-1,4-endoglucanase protein of Pseudomonas solanacearum, the Pal and Pcp proteins of H. influenzae; the Oprl protein of P. aeruginosa; the MalX and AmiA proteins of S. pneumoniae; the 34 kda antigen and TpmA protein of Treponema pallidum; the P37 protein of Mycoplasma hyorhinis; the neutral protease of Bacillus amyloliquefaciens; and the 17 kda antigen of Rickettsia rickettsii. Secretion signal sequences suitable for use in yeast are known in the art, and can be used. See, e.g., U.S. Pat. No. 5,712,113.

[0539] In some embodiments, a signal peptide from IFN-α14 is used. In other embodiments, a signal peptide from IFN-β is used. Examples of synthetic Type I interferon receptor polypeptide agonist comprising an IFN-α14 or an IFN-β signal peptide are provided in Example 2. Such signal peptides provide for secretion from a mammalian cell.

[0540] In some embodiments, a hyperglycosylated, protease-resistant polypeptide variant comprises a fusion partner and a protease cleavage site that is positioned between the fusion partner and the remainder of the polypeptide variant.

[0541] Proteolytic cleavage sites are known to those skilled in the art; a wide variety are known and have been described amply in the literature, including, e.g., Handbook of Proteolytic Enzymes (1998) A J Barrett, N D Rawlings, and J F Woessner, eds., Academic Press. Proteolytic cleavage sites include, but are not limited to, an enterokinase cleavage site: (Asp)₄Lys (SEQ ID NO:1307); a factor Xa cleavage site: Ile-Glu-Gly-Arg (SEQ ID NO:1308); a thrombin cleavage site, e.g., Leu-Val-Pro-Arg-Gly-Ser (SEQ ID NO:1309); a renin cleavage site, e.g., His-Pro-Phe-His-Leu-Val-Ile-His (SEQ ID NO:1310); a collagenase cleavage site, e.g., X-Gly-Pro (where X is any amino acid); a trypsin cleavage site, e.g., Arg-Lys; a viral protease cleavage site, such as a viral 2A or 3C protease cleavage site, including, but not limited to, a protease 2A cleavage site from a picornavirus (see, e.g., Sommergruber et al. (1994) Virol. 198:741-745), a Hepatitis A virus 3C cleavage site (see, e.g., Schultheiss et al. (1995) J Virol. 69:1727-1733), human rhinovirus 2A protease cleavage site (see, e.g., Wang et al. (1997) Biochem. Biophys. Res. Comm. 235:562-566), and a picornavirus 3 protease cleavage site (see, e.g., Walker et al. (1994) Biotechnol. 12:601-605.

Preparation of a Hyperglycosylated, Protease-resistant Polypeptide Variant

[0542] A subject synthetic Type I interferon receptor polypeptide agonist is conveniently prepared using any known method, including chemical synthesis methods, production by standard recombinant techniques, and combinations thereof. For example, a subject synthetic Type I interferon receptor polypeptide agonist can be synthesized using an automated solid-phase tert-butyloxycarbonyl and benzyl protection strategy. A subject synthetic Type I interferon receptor polypeptide agonist can be synthesized by native chemical ligation, e.g., fragments of from about 15 to about 40 amino acids in length (e.g., fragments of from about 15 to about 20, from about 20 to about 25, from about 25 to about 30, from about 30 to about 35, or from about 35 to about 40 amino acids in length) can be synthesized using standard methods of chemical synthesis, and the fragments ligated, using a process as described in Dawson, et al. (1994) Science 266:776-779. The purity of synthesized polypeptides may be assessed by reverse-phase high performance liquid chromatography (HPLC) and isoelectric focusing. The primary structures of the ligands may be verified by Edman sequencing methods.

[0543] In many embodiments, an expression vector comprising a nucleotide sequence that encodes a subject synthetic Type I interferon receptor polypeptide agonist is prepared, using conventional methods, and is introduced into a host cell, particularly a eukaryotic cell that is capable of glycosylating proteins. The expression vector provides for production of the subject synthetic Type I interferon receptor polypeptide agonist in the host cell. Thus, the present invention provides a method for producing a synthetic Type I interferon receptor polypeptide agonist, the method comprising culturing a eukaryotic host cell, which host cell comprises a subject recombinant expression vector, under conditions that favor production of the synthetic Type I interferon receptor polypeptide agonist; and isolating the synthetic Type I interferon receptor polypeptide agonist from the culture. The subject polypeptide agonist may be isolated and purified to greater than 80%, greater than 90%, greater than 95%, greater than 98%, or greater than 99% purity.

[0544] The polypeptides may be expressed in prokaryotes or eukaryotes in accordance with conventional ways, depending upon the purpose for expression. As noted above, in many embodiments, a subject synthetic Type I interferon receptor polypeptide agonist is synthesized in a eukaryotic cell. For large scale production of the protein, a unicellular organism, such as S. cerevisiae, insect cells in combination with baculovirus vectors, or cells of a higher organism such as vertebrates, particularly mammals, e.g. COS 7 cells, CHO cells, HEK293 cells, and the like, may be used as the expression host cells. In many embodiments, it is desirable to express the gene in eukaryotic cells, where the protein will benefit from native folding and post-translational modifications.

[0545] With the availability of the protein or fragments thereof in large amounts, by employing an expression host, the protein may be isolated and purified in accordance with conventional ways. A lysate may be prepared of the expression host and the lysate purified using HPLC, hydrophobic interaction chromatography (HIC), anion exchange chromatography, cation exchange chromatography, size exclusion chromatography, ultrafiltration, gel electrophoresis, affinity chromatography, or other purification technique.

[0546] A subject synthetic Type I interferon receptor polypeptide agonist may also be isolated and purified from cell culture supernatants or from cell lysates using conventional methods. For example, a lysate may be prepared of the expression host and the lysate purified using HPLC, hydrophobic interaction chromatography (HIC), anion exchange chromatography, cation exchange chromatography, size exclusion chromatography, ultrafiltration, gel electrophoresis, affinity chromatography, or other purification technique. For the most part, the compositions which are used will comprise at least 20% by weight of the desired product, more usually at least about 75% by weight, preferably at least about 95% by weight, and for therapeutic purposes, usually at least about 99.5% by weight, in relation to contaminants related to the method of preparation of the product and its purification. Usually, the percentages will be based upon total protein.

[0547] In many embodiments, a subject synthetic Type I interferon receptor polypeptide agonist is purified, e.g., a subject synthetic Type I interferon receptor polypeptide agonist is free of other, non-subject proteins, and is free other macromolecules (e.g., carbohydrates, lipids, etc.). In many embodiments, a subject synthetic Type I interferon receptor polypeptide agonist is at least about 75% pure, at least about 80% pure, at least about 85% pure, at least about 90% pure, at least about 95% pure, at least about 98% pure, or at least about 99% pure, or more than 99% pure. Methods of determining whether a protein is free of other proteins and other macromolecules are known in the art.

[0548] The hyperglycosylated, protease-resistant polypeptide variants may be prepared by recombinant methods, using conventional techniques known in the art. The particular sequence and the manner of preparation will be determined by convenience, economics, purity required, and the like.

[0549] Typically, an oligonucleotide encoding the amino acid sequence of the desired polypeptide variant is prepared by chemical synthesis, e.g., by using an oligonucleotide synthesizer, wherein oligonucleotides are designed based on the amino acid sequence of the desired polypeptide, and in many embodiments, selecting those codons that are favored in the host cell in which the recombinant polypeptide will be produced. For example, several small oligonucleotides coding for portions of the desired polypeptide may be synthesized and assembled by PCR, ligation or ligation chain reaction (LCR). The individual oligonucleotides typically contain 5′ or 3′ overhangs for complementary assembly. Once assembled, the nucleotide sequence encoding the polypeptide variant is inserted into a recombinant vector and operably linked to control sequences necessary for expression of the desired nucleic acid, and subsequent production of the subject polypeptide, in the desired transformed host cell.

[0550] In some embodiments, a desired nucleic acid is generated such that at least about 10%, at least about 20%, at least about 30%, at least about 40%, at least about 50%, at least about 60%, at least about 70%, at least about 80%, or at least about 90%, or more, of the codons are codons that are preferred in human sequences. See, e.g., Table 8, below.

TABLE 8
Codon Usage in Human. Molecular Cloning: A
Laboratory Manual. Sambrook J. and Russell D. W.
Third Edition © 2001 by Cold Spring Harbor Press.

| | | CODONS AND THEIR | |
|---|---|---|---|
| | FREQUENCY IN | USAGE IN | |
| AMINO ACID | HUMAN PROTEINS (%)^{a} | HUMAN PROTEINS (%)^{b} | |
| Alanine | 6.99 | GCU (28.0) | GCC (41.6) |
| | | GCA (20.0) | GCG (10.3) |
| Arginine | 5.28 | CGU (8.9) | CGC (21.4) |
| | | CGA (5.4) | CGG (10.4) |
| | | AGA (9.9) | AGG (11.1) |
| Asparagine | 3.92 | AAU (42.3) | AAC (57.7) |
| Aspartic Acid | 5.07 | GAU (42.8) | GAC (57.2) |
| Cysteine | 2.44 | UGU (40.6) | UGC (59.4) |
| Glutamic Acid | 6.82 | GAA (39.2) | GAG (60.7) |
| Glutamine | 4.47 | CAA (24.8) | CAG (75.2) |
| Glycine | 7.10 | GGU (15.8) | GGC (35.8) |
| | | GGA (24.1) | GGG (24.3) |
| Histidine | 2.35 | CAU (39.6) | CAC (60.4) |
| Isoleucine | 4.50 | AUU (33.1) | AUC (54.0) |
| | | AUA (12.9) | |
| Leucine | 9.56 | UUA (5.5) | UUG (11.5) |
| | | CUU (11.1) | CUC (20.8) |
| | | CUA (6.5) | CUG (44.5) |
| Lysine | 5.71 | AAA (38.9) | AAG (61.1) |
| Methionine | 2.23 | AUG (100) | |
| Phenylalanine | 3.84 | UUU (41.1) | UUC (58.2) |
| Proline | 5.67 | CCU (27.3) | CCC (35.2) |
| | | CCA (25.7) | CCG (11.6) |
| Serine | 7.25 | UCU (18.3) | UCC (23.7) |
| | | UCA (12.9) | UCG (5.9) |
| | | AGU (13.2) | AGC (25.9) |
| Threonine | 5.68 | ACU (22.4) | ACC (40.5) |
| | | ACA (25.4) | ACG (11.8) |
| Tryptophan | 1.38 | UGG (100) | |
| Tyrosine | 3.13 | UAU (40.0) | UAC (60.0) |
| Valine | 6.35 | GUU (16.4) | GUC (25.7) |
| | | GUA (9.3) | GUG (48.7) |

[0551] The polypeptide-encoding nucleic acid molecules are generally propagated by placing the molecule in a vector. Viral and non-viral vectors are used, including plasmids. The choice of plasmid will depend on the type of cell in which propagation is desired and the purpose of propagation. Certain vectors are useful for amplifying and making large amounts of the desired DNA sequence.

[0552] A recombinant expression vector is useful for effecting expression of a polypeptide-encoding nucleic acid molecule in a cell, e.g., for production of a hyperglycosylated, protease-resistant polypeptide variant. The choice of appropriate vector is well within the skill of the art. Many such vectors are available commercially.

[0553] Expression vectors are suitable for expression in cells in culture. These vectors will generally include regulatory sequences (“control sequences” or “control regions”) which are necessary to effect the expression of a desired polynucleotide to which they are operably linked.

[0554] Expression vectors generally have convenient restriction sites located near the promoter sequence to provide for the insertion of nucleic acid sequences encoding a desired protein or other protein. A selectable marker operative in the expression host may be present. Expression vectors may be used for the production of fusion proteins, where the exogenous fusion peptide provides additional functionality, i.e. increased protein synthesis, stability, reactivity with defined antisera, an enzyme marker, e.g. β-galactosidase, luciferase, etc.

[0555] Expression cassettes may be prepared that comprise a transcription initiation region, a promoter region (e.g., a promoter that is functional in a eukaryotic cell), a desired polynucleotide, and a transcriptional termination region. After introduction of the DNA, the cells containing the construct may be selected by means of a selectable marker, the cells expanded and then used for expression.

[0556] The expression cassettes may be introduced into a variety of vectors suitable for eukaryotic host cell expression, e.g. plasmid, HAC, YAC, vectors derived from animal viruses, e.g., Moloney's murine leukemia virus, SV40, vaccinia virus, baculovirus, retroviruses, or plant viruses, e.g., cauliflower mosaic virus, tobacco mosaic virus, and the like, where the vectors are normally characterized by the ability to provide selection of cells comprising the expression vectors. The vectors may provide for extrachromosomal maintenance, particularly as plasmids or viruses, or for integration into the host chromosome. Where extrachromosomal maintenance is desired, an origin sequence is provided for the replication of the plasmid, which may be low- or high copy-number. A wide variety of markers are available for selection, particularly those which protect against toxins, more particularly against antibiotics. The particular marker that is chosen is selected in accordance with the nature of the host, where in some cases, complementation may be employed with auxotrophic hosts. Introduction of the DNA construct into a host cell may use any convenient method, e.g., calcium-precipitated DNA, electroporation, fusion, transfection, infection with viral vectors, biolistics, etc.

[0557] The present invention further contemplates the production of hyperglycosylated, protease-resistant polypeptide variants in genetically modified host cells, which may be isolated host cells, comprising a polynucleotide encoding the polypeptide variant, or, in some embodiments, an expression vector capable of expressing such a polynucleotide. Suitable host cells are eukaryotic cells, including insect cells in combination with baculovirus vectors, yeast cells, such as Saccharomyces cerevisiae, or cells of a higher organism such as vertebrates, including amphibians (e.g., Xenopus laevis oocytes), and mammals, particularly mammals, e.g. COS cells, CHO cells, HEK293 cells, MA-10 cells, and the like, may be used as the expression host cells. In particular, the host cell is a eukaryotic host cell that is capable of glycosylating a protein.

[0558] The hyperglycosylated, protease-resistant polypeptide variant can be harvested from the production host cells and then isolated and purified in accordance with conventional methods of recombinant synthesis. A lysate may be prepared of the expression host and the lysate purified using high performance liquid chromatography, exclusion chromatography, gel electrophoresis, affinity chromatography, or other purification technique. For the most part, the compositions which are used will comprise at least 20% by weight of the desired product, more usually at least about 75% by weight, preferably at least about 95% by weight, and for therapeutic purposes, usually at least about 99.5% by weight, in relation to contaminants related to the method of preparation of the product and its purification. Usually, the percentages will be based upon total protein.

PEGylated Type I Interferon Receptor Polypeptide Agonists

[0559] As noted above, in some embodiments, a subject synthetic Type I interferon receptor polypeptide agonist is modified with one or more polyethylene glycol moieties, i.e., PEGylated. The PEG molecule is conjugated to one or more amino acid side chains of the subject polypeptide agonist. In some embodiments, a subject PEGylated polypeptide agonist contains a PEG moiety on only one amino acid. In other embodiments, a subject PEGylated polypeptide agonist contains a PEG moiety on two or more amino acids, e.g., the subject PEGylated polypeptide agonist contains a PEG moiety attached to two, three, four, five, six, seven, eight, nine, or ten different amino acid residues.

[0560] A subject polypeptide may be coupled directly to PEG (i.e., without a linking group) through an amino group, a sulfhydryl group, a hydroxyl group, or a carboxyl group.

[0561] In some embodiments, the PEGylated subject polypeptide is PEGylated at or near the amino terminus (N-terminus) of the subject polypeptide, e.g., the PEG moiety is conjugated to the subject polypeptide at one or more amino acid residues from amino acid 1 through amino acid 4, or from amino acid 5 through about 10. In other embodiments, the PEGylated subject polypeptide is PEGylated at one or more amino acid residues from about 10 to about 28. In other embodiments, the PEGylated subject polypeptide is PEGylated at or near the carboxyl terminus (C-terminus) of the subject polypeptide, e.g., at one or more residues from amino acids 156-166, or from amino acids 150 to 155. In other embodiments, the PEGylated subject polypeptide is PEGylated at one or more amino acid residues at one or more residues from amino acids 100-114.

[0562] The polyethylene glycol derivatization of amino acid residues at or near the receptor-binding and/or active site domains of the subject protein can disrupt the functioning of these domains. In certain embodiments of the invention, amino acids at which PEGylation is to be avoided include amino acid residues from amino acid 30 to amino acid 40; and amino acid residues from amino acid 113 to amino acid 149.

[0563] In some embodiments, PEG is attached to the subject polypeptide via a linking group. The linking group is any biocompatible linking group, where “biocompatible” indicates that the compound or group is non-toxic and may be utilized in vitro or in vivo without causing injury, sickness, disease, or death. PEG can be bonded to the linking group, for example, via an ether bond, an ester bond, a thiol bond or an amide bond. Suitable biocompatible linking groups include, but are not limited to, an ester group, an amide group, an imide group, a carbamate group, a carboxyl group, a hydroxyl group, a carbohydrate, a succinimide group (including, for example, succinimidyl succinate (SS), succinimidyl propionate (SPA), succinimidyl butanoate (SBA), succinimidyl carboxymethylate (SCM), succinimidyl succinamide (SSA) or N-hydroxy succinimide (NHS)), an epoxide group, an oxycarbonylimidazole group (including, for example, carbonyldimidazole (CDI)), a nitro phenyl group (including, for example, nitrophenyl carbonate (NPC) or trichlorophenyl carbonate (TPC)), a trysyl ate group, an aldehyde group, an isocyanate group, a vinylsulfone group, a tyrosine group, a cysteine group, a histidine group or a primary amine.

[0564] Methods for making succinimidyl propionate (SPA) and succinimidyl butanoate (SBA) ester-activated PEGs are described in U.S. Pat. No. 5,672,662 (Harris, et al.) and WO 97/03106.

[0565] Methods for attaching a PEG to a polypeptide are known in the art, and any known method can be used. See, for example, by Park et al, Anticancer Res., 1:373-376 (1981); Zaplipsky and Lee, Polyethylene Glycol Chemistry: Biotechnical and Biomedical Applications, J. M. Harris, ed., Plenum Press, NY, Chapter 21 (1992); U.S. Pat. Nos. 5,985,265; 5,672,662 (Harris, et al.) and WO 97/03106.

[0566] In many embodiments, the PEG is a monomethoxy PEG molecule that reacts with primary amine groups on the subject polypeptide. Methods of modifying polypeptides with monomethoxy PEG via reductive alkylation are known in the art. See, e.g., Chamow et al. (1994) Bioconj. Chem. 5:133-140.

Polyethylene Glycol

[0567] Polyethylene glycol suitable for conjugation to a subject polypeptide is soluble in water at room temperature, and has the general formula R(O—CH₂—CH₂)ₙO—R, where R is hydrogen or a protective group such as an alkyl or an alkanol group, and where n is an integer from 1 to 1000. Where R is a protective group, it generally has from 1 to 8 carbons.

[0568] In many embodiments, PEG has at least one hydroxyl group, e.g., a terminal hydroxyl group, which hydroxyl group is modified to generate a functional group that is reactive with an amino group, e.g., an epsilon amino group of a lysine residue, a free amino group at the N-terminus of a polypeptide, or any other amino group such as an amino group of asparagine, glutamine, arginine, or histidine.

[0569] In other embodiments, PEG is derivatized so that it is reactive with free carboxyl groups in the subject polypeptide, e.g., the free carboxyl group at the carboxyl terminus of the subject polypeptide. Suitable derivatives of PEG that are reactive with the free carboxyl group at the carboxyl-terminus of a subject polypeptide include, but are not limited to PEG-amine, and hydrazine derivatives of PEG (e.g., PEG-NH—NH₂).

[0570] In other embodiments, PEG is derivatized such that it comprises a terminal thiocarboxylic acid group, -COSH, which selectively reacts with amino groups to generate amide derivatives. Because of the reactive nature of the thio acid, selectivity of certain amino groups over others is achieved. For example, -SH exhibits sufficient leaving group ability in reaction with N-terminal amino group at appropriate pH conditions such that the ε-amino groups in lysine residues are protonated and remain non-nucleophilic. On the other hand, reactions under suitable pH conditions may make some of the accessible lysine residues to react with selectivity.

[0571] In other embodiments, the PEG comprises a reactive ester such as an N-hydroxy succinimidate at the end of the PEG chain. Such an N-hydroxysuccinimidate-containing PEG molecule reacts with select amino groups at particular pH conditions such as neutral 6.5-7.5. For example, the N-terminal amino groups may be selectively modified under neutral pH conditions. However, if the reactivity of the reagent were extreme, accessible-NH₂ groups of lysine may also react.

[0572] The PEG can be conjugated directly to the subject polypeptide, or through a linker. In some embodiments, a linker is added to the subject polypeptide, forming a linker-modified polypeptide. Such linkers provide various functionalities, e.g., reactive groups such sulfhydryl, amino, or carboxyl groups to couple a PEG reagent to the linker-modified polypeptide.

[0573] In some embodiments, the PEG conjugated to the subject polypeptide is linear. In other embodiments, the PEG conjugated to the subject polypeptide is branched. Branched PEG derivatives such as those described in U.S. Pat. No. 5,643,575, “star-PEG's” and multi-armed PEG's such as those described in Shearwater Polymers, Inc. catalog “Polyethylene Glycol Derivatives 1997-1998.” Star PEGs are described in the art including, e.g., in U.S. Pat. No. 6,046,305.

[0574] PEG having a molecular weight in a range of from about 2 kDa to about 100 kDa, is generally used, where the term “about,” in the context of PEG, indicates that in preparations of polyethylene glycol, some molecules will weigh more, some less, than the stated molecular weight. For example, PEG suitable for conjugation to a subject polypeptide has a molecular weight of from about 2 kDa to about 5 kDa, from about 5 kDa to about 10 kDa, from about 10 kDa to about 15 kDa, from about 15 kDa to about 20 kDa, from about 20 kDa to about 25 kDa, from about 25 kDa to about 30 kDa, from about 30 kDa to about 40 kDa, from about 40 kDa to about 50 kDa, from about 50 kDa to about 60 kDa, from about 60 kDa to about 70 kDa, from about 70 kDa to about 80 kDa, from about 80 kDa to about 90 kDa, or from about 90 kDa to about 100 kDa.

Populations of Subject synthetic Type I Interferon Receptor Polypeptide Agonists

[0575] The instant invention provides a composition that comprises a population of synthetic Type I interferon receptor polypeptide agonists as described above. The subject composition comprises a population of subject polypeptides, wherein the population comprises at least two different subject synthetic Type I interferon receptor polypeptide agonists (e.g., polypeptide agonists that differ from one another in amino acid sequence by at least one amino acid).

[0576] Generally, a given subject synthetic Type I interferon receptor polypeptide agonist represents from about 0.5% to about 99.5% of the total population of synthetic Type I interferon receptor polypeptide agonists in a population, e.g, a given modified synthetic Type I interferon receptor polypeptide agonist represents about 0.5%, about 1%, about 2%, about 3%, about 4%, about 5%, about 10%, about 15%, about 20%, about 25%, about 30%, about 35%, about 40%, about 45%, about 50%, about 55%, about 60%, about 65%, about 70%, about 75%, about 80%, about 85%, about 90%, about 95%, about 99%, or about 99.5% of the total population of synthetic Type I interferon receptor polypeptide agonists in a population.

Compositions

[0577] The present invention provides compositions, including pharmaceutical compositions, comprising a subject synthetic Type I interferon receptor polypeptide agonist, a known hyperglycosylated polypeptide variant, a known protease-resistant polypeptide variant, or a known hyperglycosylated, protease-resistant polypeptide variant, i.e., a polypeptide variant of a parent protein therapeutic that comprises at least one mutated protease cleavage site in place of a native protease cleavage site found in the parent protein therapeutic; and that includes (1) a carbohydrate moiety covalently attached to at least one non-native glycosylation site not found in the parent protein therapeutic and/or (2) a carbohydrate moiety covalently attached to at least one native glycosylation site found but not glycosylated in the parent protein therapeutic. Compositions will comprise a subject synthetic Type I interferon receptor polypeptide agonist, a known hyperglycosylated polypeptide variant, a known protease-resistant polypeptide variant, or a known hyperglycosylated, protease-resistant polypeptide variant; and one or more additional components, which are selected based in part on the use of the polypeptide variant. Suitable additional components include, but are not limited to, salts, buffers, solubilizers, stabilizers, detergents, protease-inhibiting agents, and the like.

[0578] In some embodiments, a subject composition comprises a subject synthetic Type I interferon receptor polypeptide agonist, a known hyperglycosylated polypeptide variant, a known protease-resistant polypeptide variant, or a known hyperglycosylated, protease-resistant polypeptide variant and a pharmaceutically acceptable excipient. A wide variety of pharmaceutically acceptable excipients are known in the art and need not be discussed in detail herein. Pharmaceutically acceptable excipients have been amply described in a variety of publications, including, for example, A. Gennaro (2000) “Remington: The Science and Practice of Pharmacy,” 20th edition, Lippincott, Williams, & Wilkins; Pharmaceutical Dosage Forms and Drug Delivery Systems (1999) H. C. Ansel et al., eds., 7th ed., Lippincott, Williams, & Wilkins; and Handbook of Pharmaceutical Excipients (2000) A. H. Kibbe et al., eds., ₃rd ed. Amer. Pharmaceutical Assoc.

[0579] In pharmaceutical dosage forms, a subject synthetic Type I interferon receptor polypeptide agonist, a known hyperglycosylated polypeptide variant, a known protease-resistant polypeptide variant, or a known hyperglycosylated, protease-resistant polypeptide variant is in some embodiments provided in the form of a pharmaceutically acceptable salts, used alone, or in appropriate association, as well as in combination, with other pharmaceutically active compounds.

Formulations Suitable for Injection

[0580] A subject synthetic Type I interferon receptor polypeptide agonist is in some embodiments formulated into a preparation suitable for injection (e.g., subcutaneous, intramuscular, intradermal, transdermal, or other injection routes) by dissolving, suspending or emulsifying the agonist in an aqueous solvent (e.g., saline, and the like) or a nonaqueous solvent, such as vegetable or other similar oils, synthetic aliphatic acid glycerides, esters of higher aliphatic acids or propylene glycol; and if desired, with conventional additives such as solubilizers, isotonic agents, suspending agents, emulsifying agents, stabilizers and preservatives.

Formulations for Enteral Delivery

[0581] For oral preparations, a subject agent (e.g., a subject synthetic Type I interferon receptor polypeptide agonist) is formulated alone or in combination with appropriate additives to make tablets, powders, granules or capsules, for example, with conventional additives, such as lactose, mannitol, corn starch or potato starch; with binders, such as crystalline cellulose, cellulose derivatives, acacia, corn starch or gelatins; with disintegrators, such as corn starch, potato starch or sodium carboxymethylcellulose; with lubricants, such as talc or magnesium stearate; and if desired, with diluents, buffering agents, moistening agents, preservatives, and flavoring agents.

[0582] Furthermore, a subject agonist can be made into suppositories by mixing with a variety of bases such as emulsifying bases or water-soluble bases. A subject agonist can be administered rectally via a suppository. The suppository can include vehicles such as cocoa butter, carbowaxes and polyethylene glycols, which melt at body temperature, yet are solidified at room temperature.

[0583] Unit dosage forms for oral or rectal administration such as syrups, elixirs, and suspensions may be provided wherein each dosage unit, for example, teaspoonful, tablespoonful, tablet or suppository, contains a predetermined amount of the composition containing one or more active agents. Similarly, unit dosage forms for injection or intravenous administration may comprise the agonist(s) in a composition as a solution in sterile water, normal saline or another pharmaceutically acceptable carrier.

[0584] For enteral delivery, a subject formulation will in some embodiments include an enteric-soluble coating material. Suitable enteric-soluble coating material include hydroxypropyl methylcellulose acetate succinate (HPMCAS), hydroxypropyl methyl cellulose phthalate (HPMCP), cellulose acetate phthalate (CAP), polyvinyl phthalic acetate (PVPA), Eudragit™, and shellac.

[0585] As one non-limiting example of a suitable oral formulation, a subject synthetic Type I interferon receptor polypeptide agonist can be formulated together with one or more pharmaceutical excipients and coated with an enteric coating, as described in U.S. Pat. No. 6,346,269. For example, a solution comprising a solvent, a subject synthetic Type I interferon receptor polypeptide agonist, and a stabilizer is coated onto a core comprising pharmaceutically acceptable excipients, to form an active agent-coated core; a sub-coating layer is applied to the active agent-coated core, which is then coated with an enteric coating layer. The core generally includes pharmaceutically inactive components such as lactose, a starch, mannitol, sodium carboxymethyl cellulose, sodium starch glycolate, sodium chloride, potassium chloride, pigments, salts of alginic acid, talc, titanium dioxide, stearic acid, stearate, micro-crystalline cellulose, glycerin, polyethylene glycol, triethyl citrate, tributyl citrate, propanyl triacetate, dibasic calcium phosphate, tribasic sodium phosphate, calcium sulfate, cyclodextrin, and castor oil. Suitable solvents for the active agent include aqueous solvents. Suitable stabilizers include alkali-metals and alkaline earth metals, bases of phosphates and organic acid salts and organic amines. The sub-coating layer comprises one or more of an adhesive, a plasticizer, and an anti-tackiness agent. Suitable anti-tackiness agents include talc, stearic acid, stearate, sodium stearyl fumarate, glyceryl behenate, kaolin and aerosil. Suitable adhesives include polyvinyl pyrrolidone (PVP), gelatin, hydroxyethyl cellulose (HEC), hydroxypropyl cellulose (HPC), hydroxypropyl methyl cellulose (HPMC), vinyl acetate (VA), polyvinyl alcohol (PVA), methyl cellulose (MC), ethyl cellulose (EC), hydroxypropyl methyl cellulose phthalate (HPMCP), cellulose acetate phthalates (CAP), xanthan gum, alginic acid, salts of alginic acid, Eudragit™, copolymer of methyl acrylic acid/methyl methacrylate with polyvinyl acetate phthalate (PVAP). Suitable plasticizers include glycerin, polyethylene glycol, triethyl citrate, tributyl citrate, propanyl triacetate and castor oil. Suitable enteric-soluble coating material include hydroxypropyl methylcellulose acetate succinate (HPMCAS), hydroxypropyl methyl cellulose phthalate(HPMCP), cellulose acetate phthalate (CAP), polyvinyl phthalic acetate (PVPA), Eudragit™ and shellac.

[0586] Suitable oral formulations also include a subject synthetic Type I interferon receptor polypeptide agonist formulated with any of the following: microgranules (see, e.g., U.S. Pat. No. 6,458,398); biodegradable macromers (see, e.g., U.S. Pat. No. 6,703,037); biodegradable hydrogels (see, e.g., Graham and McNeill (1989) Biomaterials 5:27-36); biodegradable particulate vectors (see, e.g., U.S. Pat. No. 5,736,371); bioabsorbable lactone polymers (see, e.g., U.S. Pat. No. 5,631,015); slow release protein polymers (see, e.g., U.S. Pat. No. 6,699,504; Pelias Technologies, Inc.); a poly(lactide-co-glycolide/polyethylene glycol block copolymer (see, e.g., U.S. Pat. No. 6,630,155; Atrix Laboratories, Inc.); a composition comprising a biocompatible polymer and particles of metal cation-stabilized agent dispersed within the polymer (see, e.g., U.S. Pat. No. 6,379,701; Alkermes Controlled Therapeutics, Inc.); and microspheres (see, e.g.,. U.S. Pat. No. 6,303,148; Octoplus, B. V.).

[0587] Suitable oral formulations also include a subject synthetic Type I interferon receptor polypeptide agonist formulated with any of the following: a carrier such as Emisphere® (Emisphere Technologies, Inc.); TIMERx, a hydrophilic matrix combining xanthan and locust bean gums which, in the presence of dextrose, form a strong binder gel in water (Penwest); Geminex™ (Penwest); Procise™ (GlaxoSmithKline); SAVIT™ (Mistral Pharma Inc.); RingCap™ (Alza Corp.); Smartrix® (Smartrix Technologies, Inc.); SQZgel™ (MacroMed, Inc.); Geomatrix™ (Skye Pharma, Inc.); Oros® Tri-layer (Alza Corporation); and the like.

[0588] Also suitable for use are formulations such as those described in U.S. Pat. No. 6,296,842 (Alkermes Controlled Therapeutics, Inc.); U.S. Pat. No. 6,187,330 (Scios, Inc.); and the like.

Formulations for Oral Delivery

[0589] The present invention provides pharmaceutical compositions comprising a subject synthetic Type I interferon receptor polypeptide agonist, a known hyperglycosylated polypeptide variant, a known protease-resistant polypeptide variant, or a known hyperglycosylated, protease-resistant polypeptide variant; and a pharmaceutical excipient suitable for oral delivery.

[0590] For oral preparations, a subject synthetic Type I interferon receptor polypeptide agonist, a known hyperglycosylated polypeptide variant, a known protease-resistant polypeptide variant, or a known hyperglycosylated, protease-resistant polypeptide variant is formulated alone or in combination with appropriate additives to make tablets, powders, granules or capsules, for example, with conventional additives, such as lactose, mannitol, corn starch or potato starch; with binders, such as crystalline cellulose, cellulose derivatives, acacia, corn starch or gelatins; with disintegrators, such as corn starch, potato starch or sodium carboxymethylcellulose; with lubricants, such as talc or magnesium stearate; and if desired, with diluents, buffering agents, moistening agents, preservatives, and flavoring agents.

[0591] Unit dosage forms for oral administration such as syrups, elixirs, and suspensions may be provided wherein each dosage unit, for example, teaspoonful, tablespoonful, tablet, contains a predetermined amount of the composition containing one or more active agents.

[0592] For oral delivery, a subject formulation will in some embodiments include an enteric-soluble coating material. Suitable enteric-soluble coating material include hydroxypropyl methylcellulose acetate succinate (HPMCAS), hydroxypropyl methyl cellulose phthalate (HPMCP), cellulose acetate phthalate (CAP), polyvinyl phthalic acetate (PVPA), Eudragit™, and shellac.

[0593] As one non-limiting example of a suitable oral formulation, a subject synthetic Type I interferon receptor polypeptide agonist, a known hyperglycosylated polypeptide variant, a known protease-resistant polypeptide variant, or a known hyperglycosylated, protease-resistant polypeptide variant can be formulated together with one or more pharmaceutical excipients and coated with an enteric coating, as described in U.S. Pat. No. 6,346,269. For example, a solution comprising a solvent, a known hyperglycosylated, protease-resistant polypeptide variant, and a stabilizer is coated onto a core comprising pharmaceutically acceptable excipients, to form an active agent-coated core; a sub-coating layer is applied to the active agent-coated core, which is then coated with an enteric coating layer. The core generally includes pharmaceutically inactive components such as lactose, a starch, mannitol, sodium carboxymethyl cellulose, sodium starch glycolate, sodium chloride, potassium chloride, pigments, salts of alginic acid, talc, titanium dioxide, stearic acid, stearate, micro-crystalline cellulose, glycerin, polyethylene glycol, triethyl citrate, tributyl citrate, propanyl triacetate, dibasic calcium phosphate, tribasic sodium phosphate, calcium sulfate, cyclodextrin, and castor oil. Suitable solvents for the active agent include aqueous solvents. Suitable stabilizers include alkali-metals and alkaline earth metals, bases of phosphates and organic acid salts and organic amines. The sub-coating layer comprises one or more of an adhesive, a plasticizer, and an anti-tackiness agent. Suitable anti-tackiness agents include talc, stearic acid, stearate, sodium stearyl fumarate, glyceryl behenate, kaolin and aerosil. Suitable adhesives include polyvinyl pyrrolidone (PVP), gelatin, hydroxyethyl cellulose (HEC), hydroxypropyl cellulose (HPC), hydroxypropyl methyl cellulose (HPMC), vinyl acetate (VA), polyvinyl alcohol (PVA), methyl cellulose (MC), ethyl cellulose (EC), hydroxypropyl methyl cellulose phthalate (HPMCP), cellulose acetate phthalates (CAP), xanthan gum, alginic acid, salts of alginic acid, Eudragit™, copolymer of methyl acrylic acid/methyl methacrylate with polyvinyl acetate phthalate (PVAP). Suitable plasticizers include glycerin, polyethylene glycol, triethyl citrate, tributyl citrate, propanyl triacetate and castor oil. Suitable enteric-soluble coating material include hydroxypropyl methylcellulose acetate succinate (HPMCAS), hydroxypropyl methyl cellulose phthalate(HPMCP), cellulose acetate phthalate (CAP), polyvinyl phthalic acetate (PVPA), Eudragit™ and shellac.

[0594] Suitable oral formulations also include a subject synthetic Type I interferon receptor polypeptide agonist, a known hyperglycosylated polypeptide variant, a known protease-resistant polypeptide variant, or a known hyperglycosylated, protease-resistant polypeptide variant formulated with any of the following: microgranules (see, e.g., U.S. Pat. No. 6,458,398); biodegradable macromers (see, e.g., U.S. Pat. No. 6,703,037); biodegradable hydrogels (see, e.g., Graham and McNeill (1989) Biomaterials 5:27-36); biodegradable particulate vectors (see, e.g., U.S. Pat. No. 5,736,371); bioabsorbable lactone polymers (see, e.g., U.S. Pat. No. 5,631,015); slow release protein polymers (see, e.g., U.S. Pat. No. 6,699,504; Pelias Technologies, Inc.); a poly(lactide-co-glycolide/polyethylene glycol block copolymer (see, e.g., U.S. Pat. No. 6,630,155; Atrix Laboratories, Inc.); a composition comprising a biocompatible polymer and particles of metal cation-stabilized agent dispersed within the polymer (see, e.g., U.S. Pat. No. 6,379,701; Alkermes Controlled Therapeutics, Inc.); and microspheres (see, e.g., U.S. Pat. No. 6,303,148; Octoplus, B. V.).

[0595] Suitable oral formulations also include a subject synthetic Type I interferon receptor polypeptide agonist, a known hyperglycosylated polypeptide variant, a known protease-resistant polypeptide variant, or a known hyperglycosylated, protease-resistant polypeptide variant formulated with any of the following: a carrier such as Emisphere® (Emisphere Technologies, Inc.); TIMERx, a hydrophilic matrix combining xanthan and locust bean gums which, in the presence of dextrose, form a strong binder gel in water (Penwest); Geminex™ (Penwest); Procise™ (GlaxoSmithKline); SAVIT™ (Mistral Pharma Inc.); RingCap™ (Alza Corp.); Smartrix® (Smartrix Technologies, Inc.); SQZgel™ (MacroMed, Inc.); Geomatrix™ (Skye Pharma, Inc.); Oros® Tri-layer (Alza Corporation); and the like.

[0596] Also suitable for use are formulations such as those described in U.S. Pat. No. 6,296,842 (Alkermes Controlled Therapeutics, Inc.); U.S. Pat. No. 6,187,330 (Scios, Inc.); and the like.

[0597] Also suitable for use herein are formulations comprising an intestinal absorption enhancing agent. Suitable intestinal absorption enhancers include, but are not limited to, calcium chelators (e.g., citrate, ethylenediamine tetracetic acid); surfactants (e.g., sodium dodecyl sulfate, bile salts, palmitoylcarnitine, and sodium salts of fatty acids); toxins (e.g., zonula occludens toxin); and the like.

[0598] In one aspect, a subject synthetic Type I interferon receptor polypeptide agonist, a known hyperglycosylated polypeptide variant, a known protease-resistant polypeptide variant, or a known hyperglycosylated, protease-resistant polypeptide variant is in a first unit form of an orally delivered formulation. The known synthetic Type I interferon receptor polypeptide agonist, hyperglycosylated polypeptide variant, protease-resistant polypeptide variant, or hyperglycosylated, protease-resistant polypeptide variant is a variant of a parent protein therapeutic. In these embodiments, the first unit form comprises a first number of moles of the known synthetic Type I interferon receptor polypeptide agonist, hyperglycosylated polypeptide variant, protease-resistant polypeptide variant, or hyperglycosylated, protease-resistant polypeptide variant. The parent protein therapeutic is one that is typically administered at a dosage of a second number of moles of the parent protein therapeutic in a second unit form, where the second unit form is an immediate release formulation, e.g., an immediate release formulation that is suitable for subcutaneous injection. The parent protein therapeutic is delivered by subcutaneous bolus injection at a selected dosing frequency. The parent protein therapeutic must be proven to be effective in the treatment of a disease in a patient when administered to the patient in the second unit form by subcutaneous bolus injection at the selected dosing frequency. The first number of moles in the first unit form is greater than the second number of moles in the second unit form. Nevertheless, when the first unit form is administered orally to the patient, the first number of moles of the known hyperglycosylated, protease-resistant polypeptide variant is released by the first unit form over a period of time that is no greater than the time interval between doses of the parent protein therapeutic in the selected dosing frequency.

[0599] In another aspect, the oral pharmaceutical composition of the invention comprises a first dose of the known synthetic Type I interferon receptor polypeptide agonist, hyperglycosylated polypeptide variant, protease-resistant polypeptide variant, or hyperglycosylated, protease-resistant polypeptide variant in a first unit form. In these embodiments, the parent protein therapeutic is one that is typically administered at a second dose of the parent protein in a parenteral pharmaceutical composition, where the parenteral pharmaceutical composition is an immediate release formulation, e.g., an immediate release formulation suitable for bolus injection of the second dose at a selected dosing frequency. The parent protein therapeutic must be proven to be effective in the treatment of the disease in a patient when administered to the patient by subcutaneous bolus injection in an amount of the parenteral pharmaceutical composition whereby the patient receives the second dose of the parent protein therapeutic at the selected dosing frequency. When the first dose of the known synthetic Type I interferon receptor polypeptide agonist, hyperglycosylated polypeptide variant, protease-resistant polypeptide variant, or hyperglycosylated, protease-resistant polypeptide variant is administered orally to the patient, the time required for release of all of the known synthetic Type I interferon receptor polypeptide agonist, hyperglycosylated polypeptide variant, protease-resistant polypeptide variant, or hyperglycosylated, protease-resistant polypeptide variant in the first dose is no greater than the time between doses in the selected dosing interval. The amount of the known synthetic Type I interferon receptor polypeptide agonist, hyperglycosylated polypeptide variant, protease-resistant polypeptide variant, or hyperglycosylated, protease-resistant polypeptide variant in moles of drug per kilogram of patient body weight in the first dose is greater than the amount of parent protein therapeutic in moles of drug per kilogram of patient body weight in the second dose when the first and second doses are calculated for the average patient body weight in the total population of patients suffering from the disease.

[0600] In some embodiments, the second dose is a weight-based dose, and the first dose is greater in moles of drug than the product of the second dose in moles of drug per kilogram of patient body weight multiplied by an average patient's body weight (e.g. 75 kilograms).

[0601] In other embodiments, the second dose is stratified by patient body weight, i.e., the second dose is selected from a set of two or more doses stratified by patient body weight (e.g., 1,000 mg of drug for patients having a body weight ≦75 kg and 1,200 mg of drug for patients having a body weight >75 kg), and the first dose is greater in moles of drug than the largest dose of the set of patient body weight-stratified doses.

[0602] In still other embodiments, the second dose is a fixed dose, and the first dose is greater than the second dose in moles of drug.

[0603] In one non-limiting example, the invention provides any of the oral pharmaceutical compositions used to administer orally a known synthetic IFN-α receptor polypeptide agonist, hyperglycosylated polypeptide variant, protease-resistant polypeptide variant, or hyperglycosylated, protease-resistant polypeptide variant in a method of treatment described in “Treatment Methods Using IFN-α” below.

[0604] In another non-limiting example, the invention provides any of the oral pharmaceutical compositions used to administer orally a known a subject synthetic IFN-β receptor polypeptide agonist, a known hyperglycosylated polypeptide variant, a known protease-resistant polypeptide variant, or a known hyperglycosylated, protease-resistant polypeptide variant in a method of treatment described in “Treatment Methods Using IFN-β” below.

[0605] In another non-limiting example, the invention provides any of the oral pharmaceutical compositions used to administer orally a known synthetic IFN-γ receptor polypeptide agonist, hyperglycosylated polypeptide variant, protease-resistant polypeptide variant, or hyperglycosylated, protease-resistant polypeptide variant in a method of treatment described in “Treatment Methods Using IFN-γ” below.

Oral Formulations with a Peptide Carrier

[0606] Additional oral formulations suitable for use herein include a known subject synthetic Type I interferon receptor polypeptide variant, a known hyperglycosylated polypeptide variant, a known protease-resistant polypeptide variant, or a known hyperglycosylated, protease-resistant polypeptide variant formulated with a carrier for oral delivery as described in WO 03/066859. For example, a suitable oral formulation includes a desired synthetic Type I interferon receptor polypeptide agonist, a hyperglycosylated polypeptide variant, a protease-resistant polypeptide variant, or a hyperglycosylated, protease-resistant polypeptide variant; and a penetrating peptide (also referred to as a “peptide carrier”). A penetrating peptide is any peptide that facilitates translocation of a substance across a biological barrier, e.g., the epithelial layer lining the gastrointestinal tract. Suitable peptide carriers include those derived from various proteins including, but not limited to, an integral membrane protein, a bacterial toxin, a non-pathogenic bacterium, a viral protein, an extracellular protein, and the like. The amino acid sequence of the peptide carrier can be the same as the amino acid sequence of a naturally-occurring peptide, or may be an altered version of such a peptide (e.g., including one or more amino acid substitutions compared to a naturally-occurring peptide).

[0607] Peptide carriers are typically from about 10 amino acids to about 30 amino acids in length, e.g., from about 10 amino acids to about 15 amino acids, from about 15 amino acids to about 20 amino acids, from about 20 amino acids to about 25 amino acids, or from about 25 amino acids to about 30 amino acids in length.

[0608] Suitable peptide carriers include, but are not limited to, any one of peptides 1-34, as shown in Table 9, below (SEQ ID NOs:1311-1326).

TABLE 9

| | |
|---|---|
| Peptide/Organism | Sequence |

| | |
|---|---|
| Peptide 1: from | NYHDIVLALAGVCQSAKLVHQLA |
| ORF HI0638 | |
| Haemophilus influenzae | |
| Peptide 2: from PM1850 | NYYDITLALAGVCQAAKLVQQFA |
| Pasteurella multocida | |
| Peptide 3: from YCFC | NYYDITLALAGICQSARLVQQLA |
| Escherichia coli | |
| Peptide 4: from VCI127 | AIYDRTIAFAGICQAVALVQQVA |
| Vibrio cholerae | |
| Peptide 5: from BU262 | KIHLTTLSLAGICQSAHLVQQLA |
| Buchnera aphidicola | |
| Peptide 6: from PA2627 | DPRQQLIALGAVFESAALVDKLA |
| Pseudomonas acruginosa | |
| Peptide 7: from XFI439 | LIDNRVLALAGVVQALQQVRQIA |
| Xylella fastidiosa | |
| Peptide 8: from MLR0187 | NLPPIVLAVIGICAAVFLLQQYV |
| Rhizobium loti | |
| Peptide 9: from Human | NYFIVNLALADLCMAAFNAAFNF |
| NK-2 Receptor | |
| Peptide 10: from | TAFDFNKMLDGVCTYVKGVQQYL |
| CPN0710/C | |
| Chlamydio pneumoniae | |
| Peptide 11: from MLR4119 | RAILIPLALAGLCQVARAGDISS |
| Rhizobium loti | |
| Peptide 12: from NprB | MRNLTKTSLLLAGLCTAAQMVFVTH |
| Bacillus subtilis | |
| Peptide 13: from Pilin | IELMIVIAIIGILAAIALPAYQEYV |
| Kingella dentrificans | |
| Peptide 14: from Pilin | IELMIVIAIIGILAAIALPAYQDYV |
| Eikenella corrodens | |
| Peptide 15: from zonula | ASFGFCIGRLCVQDGF |
| occludens toxin (ZOT) | |
| Peptide 29: from Human | NYFLVNLAFAEASMAAFNTVVNF |
| NK-1 Receptor | |
| Peptide 30: from YCFC | MNYYDITLALAGICQSARLVQQLA |
| Escherichia coli | |
| Peptide 31: from YCFC | MYYDITLALAGICQSARLVQQLA |
| Escherichia coli | |
| Peptide 32: from YCFC | MYDITLALAGICQSARLVQQLA |
| Escherichia coli | |
| Peptide 33: from NprB | MRNLTRTSLLLAGLCTAAQMVFV |
| Bacillus subtilis | |
| Peptide 34: from | NYHDIVLALAGVCQSARLVHQLA |
| ORF HI0638 | |
| Haemophilus influenzae | |

[0609] Suitable peptide carriers also include variants of any one of peptides 1-34 as shown in Table 9, e.g., a variant which differs from any one of peptides 1-34 by from about one amino acid to about 5 amino acids; and fragments of any one of peptides 1-34. Variants of any one of peptides 1-34 include those having from about one to about five conservative amino acid substitutions, and/or non-conservative amino acid substitutions compared to the amino acid sequence of any one of peptides 1-34. Fragments of any one of peptides 1-34 include fragments containing from about 10 contiguous amino acids to about 15 contiguous amino acids, fragments containing from about 15 contiguous amino acids to about 20 contiguous amino acids, and fragments containing from about 20 contiguous amino acids to about 25 contiguous amino acids, of any one of peptides 1-34.

[0610] The peptide carrier may be “associated with” (also referred to as “fused to,” “coupled to,” “linked to,” or “attached to”) a desired synthetic Type I interferon receptor, a hyperglycosylated, a protease-resistant, or a hyperglycosylated, protease-resistant protein in any of a number of ways, including, e.g., via a covalent interaction, an ionic interaction, a hydrophobic interaction, a hydrogen bond, or other type of association (e.g., van der Waal interaction; a non-specific association due to solvent preference; and the like). Attachment of a peptide carrier to a desired protein is achieved by any chemical, biochemical, enzymatic, or genetic coupling method known to those skilled in the art.

[0611] If the peptide carrier is coupled to the desired synthetic Type I interferon receptor, a hyperglycosylated, a protease-resistant, or a hyperglycosylated, protease-resistant protein, typically the N-terminus of the desired protein is coupled to the carboxyl terminus of the peptide carrier. A desired synthetic Type I interferon receptor, a hyperglycosylated, a protease-resistant, or a hyperglycosylated, protease-resistant protein may be coupled to the peptide carrier directly or indirectly via a covalent bond. For example, the covalent bond may be a peptide bond; or the covalent bond may be achieved by a homo- or a hetero-functional bridging reagent. The bridging reagent may be a succinimidyl-(N-maleimidomethyl)cyclohexane-1-carboxylate (SMCC)-type carrier. The covalent bond may be achieved using a peptide linker.

[0612] In some embodiments, a desired synthetic Type I interferon receptor, a hyperglycosylated, a protease-resistant, or a hyperglycosylated, protease-resistant protein is coupled to the peptide carrier via a linker peptide, which may be cleavable. The linker peptide may have any of a variety of amino acid sequences. Proteins can be joined by a spacer peptide, generally of a flexible nature, although other chemical linkages are not excluded. Currently, it is contemplated that the most useful linker sequences will generally be peptides of between about 6 and about 40 amino acids in length, or between about 6 and about 25 amino acids in length. These linkers are generally produced by using synthetic, linker-encoding oligonucleotides to couple the proteins. Peptide linkers with a degree of flexibility will generally be preferred. The linking peptides may have virtually any amino acid sequence, bearing in mind that the preferred linkers will have a sequence that results in a generally flexible peptide. The use of small amino acids, such as glycine and alanine, are of use in creating a flexible peptide. The creation of such sequences is routine to those of skill in the art. A variety of different linkers are commercially available and are considered suitable for use according to the present invention.

[0613] Amino acid sequences rich in alanine and proline residues are known to impart flexibility to multi-domain protein structures. For example, such sequences link the domains of the so-called E2 components of the 2-oxo acid dehydrogenase complexes, such as pyruvate dehydrogenase complex and 2-oxo glutarate dehydrogenase complex. Alanine-proline rich regions are also found in myosin light chains. Exemplary linkers for use in the invention have a combination of glycine, alanine, proline and methionine residues, such as AAAGGM (SEQ ID NO:1332); AAAGGMPPAAAGGM (SEQ ID NO:1333); AAAGGM (SEQ ID NO:1334); and PPAAAGGM₂ (SEQ ID NO:1335). Other exemplary linker peptides include IEGR (SEQ ID NO: 1336; which can be cleaved by factor Xa) and GGKGGK (SEQ ID NO:1337). However, any flexible linker generally between about 6 and about 40 amino acids in length may be used. Linkers may have virtually any sequence that results in a generally flexible peptide, including alanine-proline rich sequences of the type exemplified above.

[0614] In some embodiments, a desired synthetic Type I interferon receptor, a hyperglycosylated, a protease-resistant, or a hyperglycosylated, protease-resistant protein is coupled to the peptide carrier via a linker peptide that is cleavable by an enzyme. In some embodiments, the enzyme is conditionally activated under a particular physiological condition.

[0615] In other embodiments, a desired synthetic Type I interferon receptor, a hyperglycosylated, a protease-resistant, or a hyperglycosylated, protease-resistant protein is coupled to the peptide carrier via a non-covalent bond, where the non-covalent bond is achieved by an attachment of a hydrophobic moiety to the peptide carrier, such that the hydrophobic moiety enables the peptide carrier to be incorporated at the interface of a hydrophobic vesicle in which a desired synthetic Type I interferon receptor, a hyperglycosylated, a protease-resistant, or a hyperglycosylated, protease-resistant polypeptide is contained. In other embodiments, the non-covalent bond is a non-covalent, high affinity bond, such as a biotin-avidin or a biotin-streptavidin bond.

[0616] Peptides may be synthesized chemically or enzymatically, may be produced recombinantly, may be isolated from a natural source, or a combination of the foregoing. Peptides may be isolated from natural sources using standard methods of protein purification known in the art, including, but not limited to, high-performance liquid chromatography, exclusion chromatography, gel electrophoresis, affinity chromatography, or other purification technique. One may employ solid phase peptide synthesis techniques, where such techniques are known to those of skill in the art. See Jones, The Chemical Synthesis of Peptides (Clarendon Press, Oxford)(1994). Generally, in such methods a peptide is produced through the sequential additional of activated monomeric units to a solid phase bound growing peptide chain. Well-established recombinant DNA techniques can be employed for production of peptides.

[0617] Exemplary oral formulations include enteric coated tablets and gelatin capsules that include a peptide carrier; a desired synthetic Type I interferon receptor, a hyperglycosylated, a protease-resistant, or a hyperglycosylated, protease-resistant protein; and one or more of: a) a diluent, e.g., lactose, dextrose, sucrose, mannitol, sorbitol, cellulose and/or glycine; b) a protease inhibitor such as Aprotinin or trasylol; c) a lubricant, e.g., silica, talcum, stearic acid, its magnesium and/or calcium salt, poloxamer or polyethylene glycol; d) a binder (e.g., for tablets), e.g., magnesium aluminum silicate, starch paste, gelatin, tragacanth, methylcellulose, sodium carboxymethylcellulose and/or polyvinylpyrrolidone; e) an ionic surfactant active agent such as bile salts; f) a disintegrant, e.g., starches, agar, alginic acid or its sodium salt, or effervescent mixtures; and g) one or more of an absorbent, a colorant, a flavoring agent, and a sweetener. In some embodiments the oral formulation further comprises one or more of a preserving agent, a stabilizing agent, a wetting agent, an emulsifying agent, a solution promoter, a salt, and a buffer.

[0618] The oral formulations will in some embodiments further include one or more of a non-ionic detergent, an ionic detergent, a protease inhibitor, and a reducing agent. The non-ionic detergent may be a poloxamer such as Pluronic F-68; the ionic detergent may be a bile salt such as taurodeoxycholate; the protease inhibitor may be aprotinin or soy bean trypsin inhibitor; and the reducing agent may be N-acetyl-L-cysteine.

Combination Formulations

[0619] The present invention provides a pharmaceutical composition comprising a subject synthetic Type I interferon receptor polypeptide agonist that is glycosylated; a glycosylated IFN-γ; and a pharmaceutically acceptable excipient. In some embodiments, the subject glycosylated synthetic Type I interferon receptor polypeptide agonist and the glycosylated IFN-γ are co-formulated. In some embodiments, the subject glycosylated synthetic Type I interferon receptor polypeptide agonist and the glycosylated IFN-γ are co-formulated in a single liquid formulation that is contained in a single reservoir, for use in a drug delivery device. In some embodiments, the subject glycosylated synthetic Type I interferon receptor polypeptide agonist and the glycosylated IFN-γ are in a formulation suitable for delivery by injection. In other embodiments, the subject glycosylated synthetic Type I interferon receptor polypeptide agonist and the glycosylated IFN-γ are in a formulation suitable for oral delivery. Formulations suitable for oral delivery include those discussed above.

[0620] The present invention provides a pharmaceutical formulation comprising a single dose of a subject glycosylated synthetic Type I interferon receptor polypeptide agonist and a single dose of a glycosylated IFN-γ sufficient for use in any method described herein that employs the co-administration of a subject glycosylated synthetic Type I interferon receptor polypeptide agonist and a glycosylated IFN-γ in the treatment of a patient. In some aspects, the present invention provides a drug reservoir or other container containing a subject glycosylated synthetic Type I interferon receptor polypeptide agonist and a glycosylated IFN-γ co-formulated in a liquid, wherein both subject glycosylated synthetic Type I interferon receptor polypeptide agonist and glycosylated IFN-γ are present in the formulation in an amount suitable for one dose each. Dosage amounts are described herein. The reservoir can be provided in any of a variety of forms, including, but not limited to, a cartridge, a syringe, a reservoir of a continuous delivery device, and the like.

[0621] In some embodiments, a pharmaceutical composition comprising a subject glycosylated synthetic Type I interferon receptor polypeptide agonist and a glycosylated IFN-γ polypeptide is formed by admixture of (a) a pharmaceutical composition comprising the subject glycosylated synthetic Type I interferon receptor polypeptide agonist in a sterile water solution; and (b) a pharmaceutical composition comprising the glycosylated IFN-γ in a sterile water solution.

Polynucleotides, Vectors, and Host Cells

[0622] The present invention further provides a polynucleotide (“nucleic acid”) comprising a nucleotide sequence that encodes a subject synthetic Type I interferon receptor polypeptide agonist, vectors comprising a subject polynucleotide, and host cells comprising a subject polynucleotide or vector. A subject polynucleotide is useful for generating a subject expression vector and genetically modified host cells, which are useful for producing a subject polypeptide agonist.

[0623] The subject invention provides nucleic acid compositions encoding a subject synthetic Type I interferon receptor polypeptide agonist. As used herein, the term “nucleic acid composition” refers to a composition comprising a sequence of a nucleic acid having an open reading frame that encodes a subject synthetic Type I interferon receptor polypeptide agonist, and is capable, under appropriate conditions, of being expressed such that a synthetic Type I interferon receptor polypeptide agonist is produced in a host cell comprising the nucleic acid. Also encompassed in this term are nucleic acids that are homologous or substantially similar or identical to the nucleic acids encoding a subject synthetic Type I interferon receptor polypeptide agonist.

[0624] Thus, the subject invention provides nucleic acids comprising a nucleotide sequence encoding a subject synthetic Type I interferon receptor polypeptide agonist, and nucleic acids having substantial nucleotide sequence identity to such nucleic acids (e.g., homologs). In many embodiments, a subject nucleic acid comprises a nucleotide sequence that encodes a subject synthetic Type I interferon receptor polypeptide agonist and that has at least about 75%, at least about 80%, at least about 85%, at least about 90%, at least about 95%, at least about 98%, or at least about 99%, or more, nucleotide sequence identity with a nucleotide sequence (particularly the subject polypeptide-encoding region of the nucleotide sequence) encoding a subject synthetic Type I interferon receptor polypeptide agonist.

[0625] In some embodiments, a subject nucleic acid comprises a nucleotide sequence encoding a synthetic Type I interferon receptor polypeptide agonist comprising an amino acid sequence as set forth in any one of SEQ ID NOs:1363-1373. In some embodiments, a subject nucleic acid comprises a nucleotide sequence as set forth in any one of SEQ ID NOs:1376-1386.

[0626] In some embodiments, a subject nucleic acid comprises a nucleotide sequence encoding a synthetic Type I interferon receptor polypeptide agonist comprising an amino acid sequence as set forth in any one of SEQ ID NOs:48-52. In some embodiments, a subject nucleic acid comprises a nucleotide sequence encoding a synthetic Type I interferon receptor polypeptide agonist comprising an amino acid sequence as set forth in any one of SEQ ID NOs:55-59.

[0627] Sequence similarity is calculated based on a reference sequence, which may be a subset of a larger sequence, such as a conserved motif, coding region, flanking region, etc. A reference sequence will usually be at least about 18 nt long, more usually at least about 30 nt long, and may extend to the complete sequence that is being compared. Algorithms for sequence analysis are known in the art, such as BLAST, described in Altschul et al. (1990), J Mol Biol. 215:403-10 (using default settings, i.e. parameters w=4 and T=17).

[0628] Also provided are nucleic acids that hybridize to the above-described nucleic acids under stringent conditions. An example of stringent hybridization conditions is hybridization at 50° C. or higher and 0.1×SSC (15 mM sodium chloride/1.5 mM sodium citrate). Another example of stringent hybridization conditions is overnight incubation at 42° C. in a solution: 50% formamide, 5×SSC (150 mM NaCl, 15 mM trisodium citrate), 50 mM sodium phosphate (pH 7.6), 5× Denhardt's solution, 10% dextran sulfate, and 20 μg/ml denatured, sheared salmon sperm DNA, followed by washing the filters in 0.1×SSC at about 65° C. Stringent hybridization conditions are hybridization conditions that are at least as stringent as the above representative conditions. Other stringent hybridization conditions are known in the art and may also be employed to identify nucleic acids of this particular embodiment of the invention.

[0629] Nucleic acids encoding the proteins and polypeptides of the subject invention are in many embodiments DNA, including cDNA. The term “synthetic Type I interferon receptor polypeptide agonist nucleic acid,” as used herein, refers to the open reading frame encoding specific subject polypeptides, as well as adjacent 5′ and 3′ non-coding nucleotide sequences involved in the regulation of expression, e.g., from about 100 bp up to about 20 kb beyond the coding region, but possibly further in either direction. The nucleic acid may be introduced into an appropriate vector for extrachromosomal maintenance or for integration into a host genome, as described in greater detail below.

[0630] The nucleic acid compositions of the subject invention may encode all or a part of the subject synthetic Type I interferon receptor polypeptide agonists. Double or single stranded fragments may be obtained from the DNA sequence by chemically synthesizing oligonucleotides in accordance with conventional methods, by restriction enzyme digestion, by polymerase chain reaction (PCR) amplification, etc.

[0631] In some embodiments, a subject nucleic acid is prepared by chemical synthesis, e.g. by using an oligonucleotide synthesizer, wherein oligonucleotides are designed based on the amino acid sequence of the desired polypeptide, and in many embodiments, selecting those codons that are favored in the host cell in which the recombinant polypeptide will be produced. For example, several small oligonucleotides coding for portions of the desired polypeptide may be synthesized and assembled by PCR, ligation or ligation chain reaction (LCR). The individual oligonucleotides typically contain 5′ or 3′ overhangs for complementary assembly. Once assembled, the nucleotide sequence encoding the subject polypeptide is inserted into a recombinant vector and operably linked to control sequences necessary for expression of the subject nucleic acid, and subsequent production of the subject polypeptide, in the desired transformed host cell.

[0632] In some embodiments, a subject nucleic acid is generated such that at least about 10%, at least about 20%, at least about 30%, at least about 40%, at least about 50%, at least about 60%, at least about 70%, at least about 80%, or at least about 90%, or more, of the codons are codons that are preferred in human sequences. See, e.g., Table 8, below.

[0633] The subject nucleic acid molecules are generally propagated by placing the molecule in a vector. Viral and non-viral vectors are used, including plasmids. The choice of plasmid will depend on the type of cell in which propagation is desired and the purpose of propagation. Certain vectors are useful for amplifying and making large amounts of the desired DNA sequence.

[0634] The present invention further provides recombinant vectors (“constructs”) comprising a subject polynucleotide. Recombinant vectors include vectors used for propagation of a polynucleotide of the invention, and expression vectors. Recombinant vectors are useful for propagation of the subject polynucleotides (cloning vectors). A subject recombinant expression vector is useful for effecting expression of a subject polynucleotide in a cell, e.g., for production of a subject synthetic Type I interferon receptor polypeptide agonist. The choice of appropriate vector is well within the skill of the art. Many such vectors are available commercially.

[0635] Expression vectors are suitable for expression in cells in culture. These vectors will generally include regulatory sequences (“control sequences” or “control regions”) which are necessary to effect the expression of a subject polynucleotide to which they are operably linked. Still other vectors are suitable for transfer and expression in cells in a whole organism or person.

[0636] Expression vectors generally have convenient restriction sites located near the promoter sequence to provide for the insertion of nucleic acid sequences encoding heterologous proteins. A selectable marker operative in the expression host may be present. Expression vectors may be used for the production of fusion proteins, where the exogenous fusion peptide provides additional functionality, i.e. increased protein synthesis, stability, reactivity with defined antisera, an enzyme marker, e.g. β-galactosidase, luciferase, etc.

[0637] Expression cassettes may be prepared that comprise a transcription initiation region, a promoter region (e.g., a promoter that is functional in a eukaryotic cell), a subject polynucleotide, and a transcriptional termination region. After introduction of the DNA, the cells containing the construct may be selected by means of a selectable marker, the cells expanded and then used for expression.

[0638] The expression cassettes may be introduced into a variety of vectors, e.g plasmid, BAC, HAC, YAC, bacteriophage such as lambda, P1, M13, etc., animal or plant viruses, and the like, where the vectors are normally characterized by the ability to provide selection of cells comprising the expression vectors. The vectors may provide for extrachromosomal maintenance, particularly as plasmids or viruses, or for integration into the host chromosome. Where extrachromosomal maintenance is desired, an origin sequence is provided for the replication of the plasmid, which may be low- or high copy-number. A wide variety of markers are available for selection, particularly those that protect against toxins, more particularly against antibiotics. The particular marker that is chosen is selected in accordance with the nature of the host, where in some cases, complementation may be employed with auxotrophic hosts. Introduction of the DNA construct into a host cell may use any convenient method, e.g. conjugation, bacterial transformation, calcium-precipitated DNA, electroporation, fusion, transfection, infection with viral vectors, biolistics, etc.

[0639] General aspects of mammalian cell host system transformations have been described by Axel in U.S. Pat. No. 4,399,216 issued Aug. 16, 1983. Transformations into yeast are typically carried out according to the method of Van Solingen et al., J. Bact., 130: 946 (1977) and Hsiao et al., Proc. Natl. Acad. Sci. (USA), 76: 3829 (1979). Optimized methods for calcium phosphate transfection of eukaryotic host cells are described by Wurm and Jordan in U.S. Pat. Nos. 5,484,720 and 5,593,875. However, other methods for introducing DNA into cells such as by nuclear injection, electroporation, or by protoplast fusion may also be used.

[0640] The present invention further provides genetically modified host cells, which may be isolated host cells, comprising a subject polynucleotide, or, in some embodiments, a subject expression vector. Suitable host cells include prokaryotes such as E. coli, B. subtilis; eukaryotes, including insect cells in combination with baculovirus vectors, yeast cells, such as Saccharomyces cerevisiae, or cells of a higher organism such as vertebrates, including amphibians (e.g., Xenopus laevis oocytes), and mammals, particularly mammals, e.g. COS cells, CHO cells, HEK293 cells, MA-10 cells, and the like, may be used as the expression host cells. Host cells can be used for the purposes of propagating a subject polynucleotide, for production of a subject synthetic Type I interferon receptor polypeptide agonist. In many embodiments, the host cell is a eukaryotic host cell. In particular, the host cell is in many embodiments a eukaryotic host cell that is capable of glycosylating a protein.

[0641] The mammalian host cells used to produce a subject synthetic Type I interferon receptor polypeptide agonist can be cultured in a variety of media. Commercially available media such as Ham's F10 (Sigma), Minimal Essential Medium ((MEM), Sigma), RPMI-1640 (Sigma), and Dulbecco's Modified Eagle's Medium ((DMEM), Sigma) are suitable for culturing the host cells. In addition, any of the media described in Ham and Wallace, Meth. Enz., 58: 44 (1979), Barnes and Sato, Anal Biochem., 102: 255 (1980), U.S. Pat. Nos. 4,767,704; 4,657,866; 4,927,762; or U.S. Pat. No.4,560,655; WO 90/03430; WO 87/00195; U.S. Pat. Re. No. 30,985; or U.S. Pat. No. 5,122,469, the disclosures of all of which are incorporated herein by reference, may be used as culture media for the host cells. Any of these media may be supplemented as necessary with hormones and/or other growth factors (such as insulin, transferrin, or epidermal growth factor), salts (such as sodium chloride, calcium, magnesium, and phosphate), buffers (such as HEPES), nucleosides (such as adenosine and thymidine), antibiotics (such as Gentamycin™ drug), trace elements (defined as inorganic compounds usually present at final concentrations in the micromolar range), and glucose or an equivalent energy source. Any other necessary supplements may also be included at appropriate concentrations that would be known to those skilled in the art. The culture conditions, such as temperature, pH, and the like, are those previously used with the host cell selected for expression, and will be apparent to the ordinarily skilled artisan.

Antibody Compositions

[0642] Also provided are antibodies that bind specifically a subject synthetic Type I interferon receptor polypeptide agonist. Suitable antibodies are obtained by immunizing a host animal with peptides comprising all or a portion of the subject protein. Suitable host animals include mouse, rat sheep, goat, hamster, rabbit, etc. In many embodiments, a subject antibody is isolated; and in many embodiments a subject antibody is purified.

[0643] The immunogen may comprise the complete protein, or fragments and derivatives thereof. Exemplary immunogens comprise all or a part of the protein, where these residues contain the post-translation modifications found on the native target protein. Immunogens are produced in a variety of ways known in the art, e.g., expression of cloned genes using conventional recombinant methods, chemical synthesis of synthetic Type I interferon receptor polypeptide agonist polypeptides, etc.

[0644] For preparation of polyclonal antibodies, the first step is immunization of the host animal with the target protein, where the target protein will preferably be in substantially pure form, comprising less than about 1% contaminant. The immunogen may comprise the complete target protein, fragments or derivatives thereof. To increase the immune response of the host animal, the target protein may be combined with an adjuvant, where suitable adjuvants include alum, dextran, sulfate, large polymeric anions, oil and water emulsions, e.g. Freund's adjuvant, Freund's complete adjuvant, and the like. The target protein may also be conjugated to synthetic carrier proteins or synthetic antigens. A variety of hosts may be immunized to produce the polyclonal antibodies. Such hosts include rabbits, guinea pigs, rodents, e.g. mice, rats, sheep, goats, and the like. The target protein is administered to the host, usually intradermally, with an initial dosage followed by one or more, usually at least two, additional booster dosages. Following immunization, the blood from the host will be collected, followed by separation of the serum from the blood cells. The Ig present in the resultant antiserum may be further fractionated using known methods, such as ammonium salt fractionation, DEAE chromatography, and the like.

[0645] Monoclonal antibodies are produced by conventional techniques. Generally, the spleen and/or lymph nodes of an immunized host animal provide a source of plasma cells. The plasma cells are immortalized by fusion with myeloma cells to produce hybridoma cells. Culture supernatant from individual hybridomas is screened using standard techniques to identify those producing antibodies with the desired specificity. Suitable animals for production of monoclonal antibodies to the human protein include mouse, rat, hamster, etc. To raise antibodies against the mouse protein, the animal will generally be a hamster, guinea pig, rabbit, etc. The antibody may be purified from the hybridoma cell supernatants or ascites fluid by conventional techniques, e.g. affinity chromatography using protein bound to an insoluble support, protein A sepharose, etc.

[0646] The antibody may be produced as a single chain, instead of the normal multimeric structure. Single chain antibodies are described in Jost et al. (1994) J Biol. Chem. 269:26267-73, and others. DNA sequences encoding the variable region of the heavy chain and the variable region of the light chain are ligated to a spacer encoding at least about 4 amino acids of small neutral amino acids, including glycine and/or serine. The protein encoded by this fusion allows assembly of a functional variable region that retains the specificity and affinity of the original antibody.

[0647] Also of interest in certain embodiments are humanized antibodies. Methods of humanizing antibodies are known in the art. The humanized antibody may be the product of an animal having transgenic human immunoglobulin constant region genes (see for example International Patent Applications WO 90/10077 and WO 90/04036). Alternatively, the antibody of interest may be engineered by recombinant DNA techniques to substitute the CH1, CH2, CH3, hinge domains, and/or the framework domain with the corresponding human sequence (see WO 92/02190).

[0648] The use of Ig cDNA for construction of chimeric immunoglobulin genes is known in the art (Liu et al. (1987) Proc. Natl. Acad. Sci. USA 84:3439 and (1987) J Immunol. 139:3521). mRNA is isolated from a hybridoma or other cell producing the antibody and used to produce cDNA. The cDNA of interest may be amplified by the polymerase chain reaction using specific primers (U.S. Pat. Nos. 4,683,195 and 4,683,202). Alternatively, a library is made and screened to isolate the sequence of interest. The DNA sequence encoding the variable region of the antibody is then fused to human constant region sequences. The sequences of human constant regions genes may be found in Kabat et al. (1991) Sequences of Proteins of Immunological Interest, N.I.H. publication no. 91-3242. Human C region genes are readily available from known clones. The choice of isotype will be guided by the desired effector functions, such as complement fixation, or activity in antibody-dependent cellular cytotoxicity. Exemplary isotypes are IgG1, IgG3 and IgG4. Either of the human light chain constant regions, kappa or lambda, may be used. The chimeric, humanized antibody is then expressed by conventional methods.

[0649] Antibody fragments, such as Fv, F(ab′)₂ and Fab may be prepared by cleavage of the intact protein, e.g. by protease or chemical cleavage. Alternatively, a truncated gene is designed. For example, a chimeric gene encoding a portion of the F(ab′)₂ fragment would include DNA sequences encoding the CH1 domain and hinge region of the H chain, followed by a translational stop codon to yield the truncated molecule.

[0650] Consensus sequences of H and L J regions may be used to design oligonucleotides for use as primers to introduce useful restriction sites into the J region for subsequent linkage of V region segments to human C region segments. C region cDNA can be modified by site directed mutagenesis to place a restriction site at the analogous position in the human sequence.

[0651] Expression vectors include plasmids, retroviruses, YACs, EBV derived episomes, and the like. A convenient vector is one that encodes a functionally complete human CH or CL immunoglobulin sequence, with appropriate restriction sites engineered so that any VH or VL sequence can be easily inserted and expressed. In such vectors, splicing usually occurs between the splice donor site in the inserted J region and the splice acceptor site preceding the human C region, and also at the splice regions that occur within the human CH exons. Polyadenylation and transcription termination occur at native chromosomal sites downstream of the coding regions. The resulting chimeric antibody may be joined to any strong promoter, including retroviral LTRs, e.g SV-40 early promoter, (Okayama et al. (1983) Mol. Cell. Bio. 3:280), Rous sarcoma virus LTR (Gorman et al. (1982) Proc. Natl. Acad. Sci. USA 79:6777), and moloney murine leukemia virus LTR (Grosschedl et al. (1985) Cell 41:885); native Ig promoters, etc.

Diagnostic Uses

[0652] The synthetic Type I interferon receptor polypeptide agonists of the invention are unique research reagents which provide Type I interferon activity templates for use in chemical library screening, wherein the practitioner can use a signal transduction assay as an initial, high volume screen for agents that inhibit a broad array of Type I interferon activities similar to the Type I interferon activity pattern of a subject synthetic Type I interferon receptor polypeptide agonist. In this way, candidate agents likely to inhibit a broad spectrum of Type I interferon activities (similar to the activity profile of a subject synthetic Type I interferon receptor polypeptide agonist) can be obtained with ease, avoiding prohibitively expensive and logistically impossible numbers of viral growth inhibition assays or cell proliferation inhibition assays on large chemical libraries.

[0653] In one embodiment, the synthetic Type I interferon receptor polypeptide agonists of the invention are used to screen chemical libraries in a Kinase Receptor Activation (KIRA) Assay as described in WO 95/14930 (published 1 Jun. 1995). The KIRA assay is suitable for use herein because ligand binding to the Type I interferon receptor complex in situ in on the surface of host cells expressing the receptor induces a rapid increase in the phosphorylation of tyrosine residues in the intracellular domains of both IFNAR1 and IFNAR2 components of the receptor as taught in Platanias and Colamonici, J. Biol. Chem., 269: 17761-17764 (1994). The level of tyrosine phosphorylation can be used as a measure of signal transduction. The effect of a library compound on the levels of tyrosine phosphorylation induced by a subject synthetic Type I interferon receptor polypeptide agonist in the KIRA assay is an indication of the compound's inhibitory activity against the broad array of Type I interferons mimicked by the subject synthetic Type I interferon receptor polypeptide agonist.

[0654] The KIRA assay suitable for use herein employs (a) a host cell that expresses the Type I interferon receptor (both IFNAR1 and IFNAR2 components of the receptor) and (b) the subject synthetic Type I interferon receptor polypeptide agonist, which defines the inhibitor profile of interest. Cells which naturally express the human Type I interferon receptor, such as the human Daudi cells and U-266 human myeloma cells described in Colamonici and Domanski, J. Biol. Chem. 268: 10895-10899 (1993), can be used. In addition, cells which are transfected with the IFNAR1 and IFNAR2 components and contain intracellular signaling proteins necessary for Type I interferon signal transduction, such as mouse L-929 cells as described in Domanski et al., J. Biol. Chem., 270: 21606-21611 (1995), can be used. In the KIRA assay, the candidate antagonist is incubated with the subject synthetic Type I interferon receptor polypeptide agonist to be tested, and the incubation mixture is contacted with the Type I interferon receptor-expressing host cells. The treated cells are lysed, and IFNAR2 protein in the cell lysate is immobilized by capture with solid phase anti-IFNAR2 antibody. Signal transduction is assayed by measuring the amount of tyrosine phosphorylation that exists in the intracellular domain (ICD) of captured IFNAR2 and the amount of tyrosine phosphorylation that exists in the intracellular domain of any co-captured IFNAR1. Alternatively, cell lysis and immunoprecipitation can be performed under denaturing conditions in order to avoid co-capture of IFNAR1 and permit measurement of IFNAR2 tyrosine phosphorylation alone, e.g. as described in Platanias et al., J. Biol. Chem., 271: 23630-23633 (1996). The level of tyrosine phosphorylation can be accurately measured with labeled anti-phosphotyrosine antibody, which identifies phosphorylated tyrosine residues.

[0655] In another embodiment, a host cell coexpressing IFNAR1 and a chimeric construct containing IFNAR2 fused at its carboxy terminus to an affinity handle polypeptide is used in the KIRA assay. The chimeric IFNAR2 construct permits capture of the construct from cell lysate by use of a solid phase capture agent (in place of an anti-IFNAR2 antibody) specific for the affinity handle polypeptide. In a preferred embodiment, the affinity handle polypeptide is Herpes simplex virus glycoprotein D (gD) and the capture agent is an anti-gD monoclonal antibody as described in Examples 2 and 3 of WO 95/14930.

[0656] In this system, the synthetic Type I interferon receptor polypeptide agonist of the invention that possesses the Type I interferon activity profile of interest is used as a standard for analysis of the tyrosine phosphorylation inhibition patterns generated by the members of the chemical library that is screened. The IFNAR2 ICD tyrosine phosphorylation pattern generated by the synthetic Type I interferon receptor polypeptide agonist standard is compared to the tyrosine phosphorylation patterns produced by the standard in the presence of library compounds, and patterns found to indicate inhibition of tyrosine phosphorylation identify candidate agents that are likely to inhibit a range of type I interferon activities similar to the spectrum of Type I interferon activities mimicked by the standard. Accordingly, the synthetic Type I interferon receptor polypeptide agonist of the invention provides a useful means to quickly and efficiently screen large chemical libraries for compounds likely to inhibit the particular spectrum of Type I interferon activities exhibited by the subject synthetic Type I interferon receptor polypeptide agonist.

[0657] In addition, the synthetic Type I interferon receptor polypeptide agonist of the invention are useful in diagnostic assays for Type I interferon receptor expression in specific cells or tissues. In these assays, the subject synthetic Type I interferon receptor polypeptide agonists are labeled as described below and/or immobilized on an insoluble matrix, which allows for the detection of Type I interferon receptor in a sample.

[0658] The subject synthetic Type I interferon receptor polypeptide agonists can be used for the detection of Type I interferon receptor in any one of a number of well known diagnostic assay methods. For example, a biological sample may be assayed for Type I interferon receptor by obtaining the sample from a desired source, admixing the sample with a subject synthetic Type I interferon receptor polypeptide agonist to allow the subject synthetic Type I interferon receptor polypeptide agonist to form agonist/Type I interferon receptor complex with any Type I interferon receptor present in the mixture, and detecting any agonist/Type I interferon receptor complex present in the mixture. The biological sample may be prepared for assay by methods known in the art that are suitable for the particular sample. The methods of admixing the sample with the subject synthetic Type I interferon receptor polypeptide agonist and the methods of detecting agonist/Type I interferon receptor complex are chosen according to the type of assay used. Such assays include competitive and sandwich assays, and steric inhibition assays. Competitive and sandwich methods employ a phase-separation step as an integral part of the method while steric inhibition assays are conducted in a single reaction mixture.

[0659] Analytical methods for Type I interferon receptor all use one or more of the following reagents: labeled Type I interferon receptor analogue, immobilized Type I interferon receptor analogue, labeled synthetic Type I interferon receptor polypeptide agonist, immobilized synthetic Type I interferon receptor polypeptide agonist and steric conjugates. The labeled reagents also are known as “tracers.”

[0660] The label used is any detectable functionality that does not interfere with the binding of Type I interferon receptor and the subject synthetic Type I interferon receptor polypeptide agonist. Numerous labels are known for use in immunoassay, examples including moieties that may be detected directly, such as fluorochrome, chemiluminescent, and radioactive labels, as well as moieties, such as enzymes, that must be reacted or derivatized to be detected. Examples of such labels include the radioisotopes ³²P, ¹⁴C, ¹²⁵I, ³H, and ¹³¹I, fluorophores such as rare earth chelates or fluorescein and its derivatives, rhodamine and its derivatives, dansyl, umbelliferone, luceriferases, e.g., firefly luciferase and bacterial luciferase (U.S. Pat. No. 4,737,456), luciferin, 2,3-dihydrophthalazinediones, horseradish peroxidase (HRP), alkaline phosphatase, β-galactosidase, glucoamylase, lysozyme, saccharide oxidases, e.g., glucose oxidase, galactose oxidase, and glucose-6-phosphate dehydrogenase, heterocyclic oxidases such as uricase and xanthine oxidase, coupled with an enzyme that employs hydrogen peroxide to oxidize a dye precursor such as HRP, lactoperoxidase, or microperoxidase, biotin/avidin, spin labels, bacteriophage labels, stable free radicals, and the like.

[0661] Conventional methods are available to bind these labels covalently to proteins or polypeptides. For instance, coupling agents such as dialdehydes, carbodiimides, dimaleimides, bis-imidates; bis-diazotized benzidine, and the like may be used to tag the antibodies with the above-described fluorescent, chemiluminescent, and enzyme labels. See, for example, U.S. Pat. Nos. 3,940,475 (fluorimetry) and 3,645,090 (enzymes); Hunter et al., Nature, 144: 945 (1962); David eta al., Biochemistry, 13: 1014-1021 (1974); Pain et al., J. Immunol. Methods, 40: 219-230 (1981); and Nygren, J. Histochem. and Cytochem., 30: 407-412 (1982). Preferred labels herein are enzymes such as horseradish peroxidase and alkaline phosphatase.

[0662] The conjugation of such label, including the enzymes, to the antibody is a standard manipulative procedure for one of ordinary skill in immunoassay techniques. See, for example, O'Sullivan et al., “Methods for the Preparation of Enzyme-antibody Conjugates for Use in Enzyme Immunoassay,” in Methods in Enzymology, ed. J. J. Langone and H. Van Vunakis, Vol. 73 (Academic Press, New York, N.Y., 1981), pp. 147-166.

[0663] Immobilization of reagents is required for certain assay methods. Immobilization entails separating the synthetic Type I interferon receptor polypeptide agonist from any Type I interferon receptor that remains free in solution. This conventionally is accomplished by either insolubilizing the synthetic Type I interferon receptor polypeptide agonist or Type I interferon receptor analogue before the assay procedure, as by adsorption to a water-insoluble matrix or surface (Bennich et al., U.S. Pat. No. 3,720,760), by covalent coupling (for example, using glutaraldehyde cross-linking), or by insolubilizing the synthetic Type I interferon receptor polypeptide agonist or Type I interferon receptor analogue afterward, e.g., by immunoprecipitation.

[0664] Other assay methods, known as competitive or sandwich assays, are well established and widely used in the commercial diagnostics industry.

[0665] Competitive assays rely on the ability of a tracer Type I interferon receptor analogue to compete with the test sample Type I interferon receptor for a limited number of synthetic Type I interferon receptor polypeptide agonist binding sites. The synthetic Type I interferon receptor polypeptide agonist generally is insolubilized before or after the competition and then the tracer and Type I interferon receptor bound to the synthetic Type I interferon receptor polypeptide agonist are separated from the unbound tracer and Type I interferon receptor. This separation is accomplished by decanting (where the binding partner was preinsolubilized) or by centrifuging (where the binding partner was precipitated after the competitive reaction). The amount of test sample Type I interferon receptor is inversely proportional to the amount of bound tracer as measured by the amount of marker substance. Dose-response curves with known amounts of Type I interferon receptor are prepared and compared with the test results to quantitatively determine the amount of Type I interferon receptor present in the test sample. These assays are called ELISA systems when enzymes are used as the detectable markers.

[0666] Another species of competitive assay, called a “homogeneous” assay, does not require a phase separation. Here, a conjugate of an enzyme with the Type I interferon receptor is prepared and used such that when synthetic Type I interferon receptor polypeptide agonist binds to the Type I interferon receptor the presence of the synthetic Type I interferon receptor polypeptide agonist modifies the enzyme activity. In this case, the Type I interferon receptor or its immunologically active fragments are conjugated with a bifunctional organic bridge to an enzyme such as peroxidase. Conjugates are selected for use with synthetic Type I interferon receptor polypeptide agonist so that binding of the synthetic Type I interferon receptor polypeptide agonist inhibits or potentiates the enzyme activity of the label. This method per se is widely practiced under the name of EMIT.

[0667] Steric conjugates are used in steric hindrance methods for homogeneous assay. These conjugates are synthesized by covalently linking a low-molecular-weight hapten to a small Type I interferon receptor fragment so that antibody to hapten is substantially unable to bind the conjugate at the same time as synthetic Type I interferon receptor polypeptide agonist. Under this assay procedure the Type I interferon receptor present in the test sample will bind synthetic Type I interferon receptor polypeptide agonist, thereby allowing anti-hapten to bind the conjugate, resulting in a change in the character of the conjugate hapten, e.g., a change in fluorescence when the hapten is a fluorophore.

[0668] Sandwich assays particularly are useful for the determination of Type I interferon receptor in a sample. In sequential sandwich assays an immobilized synthetic Type I interferon receptor polypeptide agonist is used to adsorb test sample Type I interferon receptor, the test sample is removed as by washing, the bound Type I interferon receptor is used to adsorb a labeled anti-Type I interferon receptor antibody and bound material is then separated from residual tracer. The amount of bound tracer is directly proportional to test sample Type I interferon receptor. In “simultaneous” sandwich assays the test sample is not separated before adding the labeled anti-Type I interferon receptor antibody.

[0669] The foregoing are merely exemplary diagnostic assays for Type I interferon receptor. Other methods now or hereafter developed that use synthetic Type I interferon receptor polypeptide agonist for the determination of Type I interferon receptor are included within the scope hereof, including the bioassays described above.

Therapeutic Methods

[0670] The present invention provides method of treating fibrotic disorders. The subject methods generally involve administering to an individual in need thereof an effective combination of a subject synthetic Type I interferon receptor polypeptide agonist, a hyperglycosylated polypeptide variant, a protease-resistant polypeptide variant, or a hyperglycosylated, protease-resistant polypeptide variant and a Type II interferon receptor agonist. In some embodiments, a subject treatment method further includes administering at least one additional anti-fibrotic agent.

[0671] The present invention further provides methods of treating cancer. The subject methods generally involve administering to an individual in need thereof an effective amount of a subject synthetic Type I interferon receptor polypeptide agonist, a hyperglycosylated polypeptide variant, a protease-resistant polypeptide variant, or a hyperglycosylated, protease-resistant polypeptide variant. In some embodiments, a subject method further includes administering at least one additional anti-cancer agent.

[0672] The present invention additionally provides methods of treating viral infection. The subject methods generally involve administering to an individual in need thereof an effective amount of a subject synthetic Type I interferon receptor polypeptide agonist, a hyperglycosylated polypeptide variant, a protease-resistant polypeptide variant, or a hyperglycosylated, protease-resistant polypeptide variant. In some embodiments, a subject method further includes administering at least one additional anti-viral agent.

[0673] In some embodiments, a subject treatment method further includes administering a side effect management agent, to treat a side effect induced by a therapeutic agent.

Fibrotic Disorders

[0674] The present invention provides methods for treating a fibrotic disorder in an individual having a fibrotic disorder. The method generally involves administering an effective combination of a subject synthetic Type I interferon receptor polypeptide agonist, a hyperglycosylated polypeptide variant, a protease-resistant polypeptide variant, or a hyperglycosylated, protease-resistant polypeptide variant and a Type II interferon receptor agonist. The methods provide for treatment of fibrotic diseases, including those affecting the lung such as idiopathic pulmonary fibrosis, pulmonary fibrosis from a known etiology, liver fibrosis or cirrhosis, cardiac fibrosis, and renal fibrosis. The etiology may be due to any acute or chronic insult including toxic, metabolic, genetic and infectious agents.

[0675] Fibrosis is generally characterized by the pathologic or excessive accumulation of collagenous connective tissue. Fibrotic disorders include, but are not limited to, collagen disease, interstitial lung disease, human fibrotic lung disease (e.g., obliterative bronchiolitis, idiopathic pulmonary fibrosis, pulmonary fibrosis from a known etiology, tumor stroma in lung disease, systemic sclerosis affecting the lungs, Hermansky-Pudlak syndrome, coal worker's pneumoconiosis, asbestosis, silicosis, chronic pulmonary hypertension, AIDS-associated pulmonary hypertension, sarcoidosis, and the like), fibrotic vascular disease, arterial sclerosis, atherosclerosis, varicose veins, coronary infarcts, cerebral infarcts, myocardial fibrosis, musculoskeletal fibrosis, post-surgical adhesions, human kidney disease (e.g., nephritic syndrome, Alport's syndrome, HIV-associated nephropathy, polycystic kidney disease, Fabry's disease, diabetic nephropathy, chronic glomerulonephritis, nephritis associated with systemic lupus, and the like), cutis keloid formation, progressive systemic sclerosis (PSS), primary sclerosing cholangitis (PSC), liver fibrosis, liver cirrhosis, renal fibrosis, pulmonary fibrosis, cystic fibrosis, chronic graft versus host disease, scleroderma (local and systemic), Grave's opthalmopathy, diabetic retinopathy, glaucoma, Peyronie's disease, penis fibrosis, urethrostenosis after the test using a cystoscope, inner accretion after surgery, scarring, myelofibrosis, idiopathic retroperitoneal fibrosis, peritoneal fibrosis from a known etiology, drug-induced ergotism, fibrosis incident to benign or malignant cancer, fibrosis incident to microbial infection (e.g., viral, bacterial, parasitic, fungal, etc.), Alzheimer's disease, fibrosis incident to inflammatory bowel disease (including stricture formation in Crohn's disease and microscopic colitis), fibrosis induced by chemical or environmental insult (e.g., cancer chemotherapy, pesticides, radiation (e.g., cancer radiotherapy), and the like), and the like.

[0676] In some embodiments, effective amounts of a synthetic Type I interferon receptor polypeptide agonist and a Type II interferon receptor agonist are any combined dosage that, when administered to an individual having a fibrotic disorder, is effective to reduce fibrosis or reduce the rate of progression of fibrosis by at least about 10%, at least about 15%, at least about 20%, at least about 25%, at least about 30%, at least about 35%, at least about 40%, at least about 45%, or at least about 50%, or more, compared with the degree of fibrosis in the individual prior to treatment or compared to the rate of progression of fibrosis that would have been experienced by the patient in the absence of treatment.

[0677] In some embodiments, effective amounts of a subject synthetic Type I interferon receptor polypeptide agonist, a hyperglycosylated polypeptide variant, a protease-resistant polypeptide variant, or a hyperglycosylated, protease-resistant polypeptide variant and a Type II interferon receptor agonist are any combined dosage that, when administered to an individual having a fibrotic disorder, is effective to increase, or to reduce the rate of deterioration of, at least one function of the organ affected by fibrosis (e.g., lung, liver, kidney, etc.) by at least about 10%, at least about 15%, at least about 20%, at least about 25%, at least about 30%, at least about 35%, at least about 40%, at least about 45%, or at least about 50%, or more, compared to the baseline level of organ function in the individual prior to treatment or compared to the rate of deterioration in organ function that would have been experienced by the individual in the absence of treatment.

[0678] Methods of measuring the extent of fibrosis in a given organ, and methods of measuring the function of any given organ, are well known in the art.

Idiopathic Pulmonary Fibrosis

[0679] The present invention provides methods of treating idiopathic pulmonary fibrosis (IPF). The methods generally involve administering to an individual having IPF effective amounts of a subject synthetic Type I interferon receptor polypeptide agonist, a hyperglycosylated polypeptide variant, a protease-resistant polypeptide variant, or a hyperglycosylated, protease-resistant polypeptide variant and a Type II interferon receptor agonist.

[0680] In some embodiments, a diagnosis of IPF is confirmed by the finding of usual interstitial pneumonia (UIP) on histopathological evaluation of lung tissue obtained by surgical biopsy. The criteria for a diagnosis of IPF are known. Ryu et al. (1998) Mayo Clin. Proc. 73:1085-1101.

[0681] In other embodiments, a diagnosis of IPF is a definite or probable IPF made by high resolution computer tomography (HRCT). In a diagnosis by HRCT, the presence of the following characteristics is noted: (1) presence of reticular abnormality and/or traction bronchiectasis with basal and peripheral predominance; (2) presence of honeycombing with basal and peripheral predominance; and (3) absence of atypical features such as micronodules, peribronchovascular nodules, consolidation, isolated (non-honeycomb) cysts, ground glass attenuation (or, if present, is less extensive than reticular opacity), and mediastinal adenopathy (or, if present, is not extensive enough to be visible on chest x-ray). A diagnosis of definite IPF is made if characteristics (1), (2), and (3) are met. A diagnosis of probable IPF is made if characteristics (1) and (3) are met.

[0682] In some embodiments, “effective amounts” of a subject synthetic Type I interferon receptor polypeptide agonist, a hyperglycosylated polypeptide variant, a protease-resistant polypeptide variant, or a hyperglycosylated, protease-resistant polypeptide variant and a Type II interferon receptor agonist are a combined dosage that is effective to decrease disease progression by at least about 10%, at least about 15%, at least about 20%, at least about 25%, at least about 30%, at least about 35%, at least about 40%, at least about 45%, at least about 50%, at least about 55%, at least about 60%, at least about 65%, at least about 70%, or more, compared with a placebo control or an untreated control.

[0683] Disease progression is the occurrence of one or more of the following: (1) a decrease in predicted FVC of 10% or more; (2) an increase in A-a gradient of 5 mm Hg or more; (3) a decrease of 15% of more in single breath DL_{CO}. Whether disease progression has occurred is determined by measuring one or more of these parameters on two consecutive occasions 4 to 14 weeks apart, and comparing the value to baseline.

[0684] Thus, e.g., where an untreated or placebo-treated individual exhibits a 50% decrease in FVC over a period of time, an individual administered with an effective combination of a synthetic Type I interferon receptor polypeptide agonist and a Type II interferon receptor agonist exhibits a decrease in FVC of 45%, about 42%, about 40%, about 37%, about 35%, about 32%, about 30%, or less, over the same time period.

[0685] In some embodiments, “effective amounts” of a subject synthetic Type I interferon receptor polypeptide agonist, a hyperglycosylated polypeptide variant, a protease-resistant polypeptide variant, or a hyperglycosylated, protease-resistant polypeptide variant and a Type II interferon receptor agonist are any combined dosage that is effective to increase progression-free survival time, e.g., the time from baseline (e.g., a time point from 1 day to 28 days before beginning of treatment) to death or disease progression is increased by at least about 10%, at least about 20%, at least about 25%, at least about 30%, at least about 40%, at least about 50%, at least about 60%, at least about 70%, at least about 80%, at least about 90%, at least about 2-fold, at least about 3-fold, at least about 4-fold, at least about 5-fold, or more, compared a placebo-treated or an untreated control individual. Thus, e.g., in some embodiments effective amounts of a subject synthetic Type I interferon receptor polypeptide agonist, a hyperglycosylated polypeptide variant, a protease-resistant polypeptide variant, or a hyperglycosylated, protease-resistant polypeptide variant and a Type II interferon receptor agonist are any combined dosage that is effective to increase the progression-free survival time by at least about 1 week, at least about 2 weeks, at least about 3 weeks, at least about 4 weeks, at least about 2 months, at least about 3 months, at least about 4 months, at least about 5 months, at least about 6 months, at least about 8 months, at least about 10 months, at least about 12 months, at least about 18 months, at least about 2 years, at least about 3 years, or longer, compared to a placebo-treated or untreated control.

[0686] In some embodiments, effective amounts of a subject synthetic Type I interferon receptor polypeptide agonist, a hyperglycosylated polypeptide variant, a protease-resistant polypeptide variant, or a hyperglycosylated, protease-resistant polypeptide variant and a Type II interferon receptor agonist are any combined dosage that is effective to increase at least one parameter of lung function, e.g., a combined dosage that increases at least one parameter of lung function by at least about 10%, at least about 20%, at least about 25%, at least about 30%, at least about 40%, at least about 50%, at least about 60%, at least about 70%, at least about 80%, at least about 90%, at least about 2-fold, at least about 3-fold, at least about 4-fold, at least about 5-fold, or more, compared to an untreated individual or a placebo-treated control individual. In some of these embodiments, a determination of whether a parameter of lung function is increased is made by comparing the baseline value with the value at any time point after the beginning of treatment, e.g., 48 weeks after the beginning of treatment, or between two time points, e.g., about 4 to about 14 weeks apart, after the beginning of treatment.

[0687] In some embodiments, effective amounts of a subject synthetic Type I interferon receptor polypeptide agonist, a hyperglycosylated polypeptide variant, a protease-resistant polypeptide variant, or a hyperglycosylated, protease-resistant polypeptide variant and a Type II interferon receptor agonist are any combined dosage that is effective to increase the FVC by at least about 10% at least about 20%, at least about 25%, at least about 30%, at least about 40%, at least about 50%, at least about 60%, at least about 70%, at least about 80%, at least about 90%, at least about 2-fold, at least about 3-fold, at least about 4-fold, at least about 5-fold, or more compared to baseline on two consecutive occasions 4 to 14 weeks apart.

[0688] In some embodiments, effective amounts of a subject synthetic Type I interferon receptor polypeptide agonist, a hyperglycosylated polypeptide variant, a protease-resistant polypeptide variant, or a hyperglycosylated, protease-resistant polypeptide variant and a Type II interferon receptor agonist are any combined dosage that results in a decrease in alveolar:arterial (A-a) gradient of at least about 5 mm Hg, at least about 7 mm Hg, at least about 10 mm Hg, at least about 12 mm Hg, at least about 15 mm Hg, or more, compared to baseline.

[0689] In some embodiments, effective amounts of a subject synthetic Type I interferon receptor polypeptide agonist, a hyperglycosylated polypeptide variant, a protease-resistant polypeptide variant, or a hyperglycosylated, protease-resistant polypeptide variant and a Type II interferon receptor agonist are any combined dosage that increases the single breath DL_{CO} by at least about 15%, at least about 20%, at least about 30%, at least about 40%, at least about 50%, at least about 60%, at least about 70%, at least about 80%, at least about 90%, at least about 2-fold, at least about 3-fold, at least about 4-fold, at least about 5-fold, or more, compared to baseline. CL_{co} is the lung diffusing capacity for carbon monoxide, and is expressed as mL CO/mm Hg/second.

[0690] Parameters of lung function include, but are not limited to, forced vital capacity (FVC); forced expiratory volume (FEV₁); total lung capacity; partial pressure of arterial oxygen at rest; partial pressure of arterial oxygen at maximal exertion.

[0691] Lung function can be measured using any known method, including, but not limited to spirometry.

Liver Fibrosis

[0692] The present invention provides methods of treating liver fibrosis, including reducing clinical liver fibrosis, reducing the likelihood that liver fibrosis will occur, and reducing a parameter associated with liver fibrosis. The methods generally involve administering a combination of an effective amount of a subject synthetic Type I interferon receptor polypeptide agonist, a hyperglycosylated polypeptide variant, a protease-resistant polypeptide variant, or a hyperglycosylated, protease-resistant polypeptide variant and an effective amount of a Type II interferon receptor agonist to an individual in need thereof. Of particular interest in many embodiments is treatment of humans.

[0693] Liver fibrosis is a precursor to the complications associated with liver cirrhosis, such as portal hypertension, progressive liver insufficiency, and hepatocellular carcinoma. A reduction in liver fibrosis thus reduces the incidence of such complications. Accordingly, the present invention further provides methods of reducing the likelihood that an individual will develop complications associated with cirrhosis of the liver.

[0694] The present methods generally involve administering therapeutically effective amounts of a subject synthetic Type I interferon receptor polypeptide agonist, a hyperglycosylated polypeptide variant, a protease-resistant polypeptide variant, or a hyperglycosylated, protease-resistant polypeptide variant and a Type II interferon receptor agonist. As used herein, “effective amounts” of a subject synthetic Type I interferon receptor polypeptide agonist, a hyperglycosylated polypeptide variant, a protease-resistant polypeptide variant, or a hyperglycosylated, protease-resistant polypeptide variant and a Type II interferon receptor agonist are any combined dosage that is effective in reducing liver fibrosis or reducing the rate of progression of liver fibrosis; and/or that is effective in reducing the likelihood that an individual will develop liver fibrosis; and/or that is effective in reducing a parameter associated with liver fibrosis; and/or that is effective in reducing a disorder associated with cirrhosis of the liver.

[0695] The invention also provides a method for treatment of liver fibrosis in an individual comprising administering to the individual an amount of a subject synthetic Type I interferon receptor polypeptide agonist, a hyperglycosylated polypeptide variant, a protease-resistant polypeptide variant, or a hyperglycosylated, protease-resistant polypeptide variant and an amount of Type II interferon receptor agonist that in combination are effective for prophylaxis or therapy of liver fibrosis in the individual, e.g., increasing the probability of survival, reducing the risk of death, ameliorating the disease burden or slowing the progression of disease in the individual.

[0696] Whether treatment with a combination of a subject synthetic Type I interferon receptor polypeptide agonist, a hyperglycosylated polypeptide variant, a protease-resistant polypeptide variant, or a hyperglycosylated, protease-resistant polypeptide variant and a Type II interferon receptor agonist is effective in reducing liver fibrosis is determined by any of a number of well-established techniques for measuring liver fibrosis and liver function. Whether liver fibrosis is reduced is determined by analyzing a liver biopsy sample. An analysis of a liver biopsy comprises assessments of two major components: necroinflammation assessed by “grade” as a measure of the severity and ongoing disease activity, and the lesions of fibrosis and parenchymal or vascular remodeling as assessed by “stage” as being reflective of long-term disease progression. See, e.g., Brunt (2000) Hepatol. 31:241-246; and METAVIR (1994) Hepatology 20:15-20. Based on analysis of the liver biopsy, a score is assigned. A number of standardized scoring systems exist which provide a quantitative assessment of the degree and severity of fibrosis. These include the METAVIR, Knodell, Scheuer, Ludwig, and Ishak scoring systems.

[0697] The METAVIR scoring system is based on an analysis of various features of a liver biopsy, including fibrosis (portal fibrosis, centrilobular fibrosis, and cirrhosis); necrosis (piecemeal and lobular necrosis, acidophilic retraction, and ballooning degeneration); inflammation (portal tract inflammation, portal lymphoid aggregates, and distribution of portal inflammation); bile duct changes; and the Knodell index (scores of periportal necrosis, lobular necrosis, portal inflammation, fibrosis, and overall disease activity). The definitions of each stage in the METAVIR system are as follows: score: 0, no fibrosis; score: 1, stellate enlargement of portal tract but without septa formation; score: 2, enlargement of portal tract with rare septa formation; score: 3, numerous septa without cirrhosis; and score: 4, cirrhosis.

[0698] Knodell's scoring system, also called the Hepatitis Activity Index, classifies specimens based on scores in four categories of histologic features: I. Periportal and/or bridging necrosis; II. Intralobular degeneration and focal necrosis; III. Portal inflammation; and IV. Fibrosis. In the Knodell staging system, scores are as follows: score: 0, no fibrosis; score: 1, mild fibrosis (fibrous portal expansion); score: 2, moderate fibrosis; score: 3, severe fibrosis (bridging fibrosis); and score: 4, cirrhosis. The higher the score, the more severe the liver tissue damage. Knodell (1981) Hepatol. 1:431.

[0699] In the Scheuer scoring system scores are as follows: score: 0, no fibrosis; score: 1, enlarged, fibrotic portal tracts; score: 2, periportal or portal-portal septa, but intact architecture; score: 3, fibrosis with architectural distortion, but no obvious cirrhosis; score: 4, probable or definite cirrhosis. Scheuer (1991) J Hepatol. 13:372.

[0700] The Ishak scoring system is described in Ishak (1995) J Hepatol. 22:696-699. Stage 0, No fibrosis; Stage 1, Fibrous expansion of some portal areas, with or without short fibrous septa; stage 2, Fibrous expansion of most portal areas, with or without short fibrous septa; stage 3, Fibrous expansion of most portal areas with occasional portal to portal (P-P) bridging; stage 4, Fibrous expansion of portal areas with marked bridging (P-P) as well as portal-central (P-C); stage 5, Marked bridging (P-P and/or P-C) with occasional nodules (incomplete cirrhosis); stage 6, Cirrhosis, probable or definite. The benefit of anti-fibrotic therapy can also be measured and assessed by using the Child-Pugh scoring system which comprises a multicomponent point system based upon abnormalities in serum bilirubin level, serum albumin level, prothrombin time, the presence and severity of ascites, and the presence and severity of encephalopathy. Based upon the presence and severity of abnormality of these parameters, patients may be placed in one of three categories of increasing severity of clinical disease: A, B, or C.

[0701] In some embodiments, a therapeutically effective combination of a subject synthetic Type I interferon receptor polypeptide agonist, a hyperglycosylated polypeptide variant, a protease-resistant polypeptide variant, or a hyperglycosylated, protease-resistant polypeptide variant and a Type II interferon receptor agonist is any combined dosage that effects a change of one unit or more in the fibrosis stage based on pre- and post-therapy liver biopsies. In particular embodiments, a therapeutically effective combined dosage reduces liver fibrosis by at least one unit in the METAVIR, the Knodell, the Scheuer, the Ludwig, or the Ishak scoring system.

[0702] Secondary, or indirect, indices of liver function can also be used to evaluate the efficacy of treatment with a subject synthetic Type I interferon receptor polypeptide agonist, a hyperglycosylated polypeptide variant, a protease-resistant polypeptide variant, or a hyperglycosylated, protease-resistant polypeptide variant and Type II interferon receptor agonist. Morphometric computerized semi-automated assessment of the quantitative degree of liver fibrosis based upon specific staining of collagen and/or serum markers of liver fibrosis can also be measured as an indication of the efficacy of a subject treatment method. Secondary indices of liver function include, but are not limited to, serum transarninase levels, prothrombin time, bilirubin, platelet count, portal pressure, albumin level, and assessment of the Child-Pugh score.

[0703] In another embodiment, an effective combination of a subject synthetic Type I interferon receptor polypeptide agonist, a hyperglycosylated polypeptide variant, a protease-resistant polypeptide variant, or a hyperglycosylated, protease-resistant polypeptide variant and a Type II interferon receptor agonist is any combined dosage that is effective to increase an index of liver function by at least about 10%, at least about 20%, at least about 25%, at least about 30%, at least about 35%, at least about 40%, at least about 45%, at least about 50%, at least about 55%, at least about 60%, at least about 65%, at least about 70%, at least about 75%, or at least about 80%, or more, compared to the index of liver function in an untreated individual, or in a placebo-treated individual. Those skilled in the art can readily measure such indices of liver function, using standard assay methods, many of which are commercially available, and are used routinely in clinical settings.

[0704] Serum markers of liver fibrosis can also be measured as an indication of the efficacy of a subject treatment method. Serum markers of liver fibrosis include, but are not limited to, hyaluronate, N-terminal procollagen III peptide, 7S domain of type IV collagen, C-terminal procollagen I peptide, and laminin. Additional biochemical markers of liver fibrosis include α-2-macroglobulin, haptoglobin, gamma globulin, apolipoprotein A, and gamma glutamyl transpeptidase.

[0705] In another embodiment, a therapeutically effective combination of a subject synthetic Type I interferon receptor polypeptide agonist, a hyperglycosylated polypeptide variant, a protease-resistant polypeptide variant, or a hyperglycosylated, protease-resistant polypeptide variant and a Type II interferon receptor agonist is any combined dosage that is effective to reduce a serum level of a marker of liver fibrosis by at least about 10%, at least about 20%, at least about 25%, at least about 30%, at least about 35%, at least about 40%, at least about 45%, at least about 50%, at least about 55%, at least about 60%, at least about 65%, at least about 70%, at least about 75%, or at least about 80%, or more, compared to the level of the marker in an untreated individual, or in a placebo-treated individual. Those skilled in the art can readily measure such serum markers of liver fibrosis, using standard assay methods, many of which are commercially available, and are used routinely in clinical settings. Methods of measuring serum markers include immunological-based methods, e.g., enzyme-linked immunosorbent assays (ELISA), radioimmunoassays, and the like, using antibody specific for a given serum marker.

[0706] Quantitative tests of functional liver reserve can also be used to assess the efficacy of treatment with a subject synthetic Type I interferon receptor polypeptide agonist, a hyperglycosylated polypeptide variant, a protease-resistant polypeptide variant, or a hyperglycosylated, protease-resistant polypeptide variant and a Type II interferon receptor agonist. These include: indocyanine green clearance (ICG), galactose elimination capacity (GEC), aminopyrine breath test (ABT), antipyrine clearance, monoethylglycine-xylidide (MEG-X) clearance, and caffeine clearance.

[0707] As used herein, a “complication associated with cirrhosis of the liver” refers to a disorder that is a sequellae of decompensated liver disease, i.e., or occurs subsequently to and as a result of development of liver fibrosis, and includes, but it not limited to, development of ascites, variceal bleeding, portal hypertension, jaundice, progressive liver insufficiency, encephalopathy, hepatocellular carcinoma, liver failure requiring liver transplantation, and liver-related mortality.

[0708] In another embodiment, a therapeutically effective combination of a subject synthetic Type I interferon receptor polypeptide agonist, a hyperglycosylated polypeptide variant, a protease-resistant polypeptide variant, or a hyperglycosylated, protease-resistant polypeptide variant and a Type II interferon receptor agonist is any combined dosage that is effective in reducing the incidence of (e.g., the likelihood that an individual will develop) a disorder associated with cirrhosis of the liver by at least about 10%, at least about 20%, at least about 25%, at least about 30%, at least about 35%, at least about 40%, at least about 45%, at least about 50%, at least about 55%, at least about 60%, at least about 65%, at least about 70%, at least about 75%, or at least about 80%, or more, compared to an untreated individual, or in a placebo-treated individual.

[0709] Whether combination therapy with a subject synthetic Type I interferon receptor polypeptide agonist, a hyperglycosylated polypeptide variant, a protease-resistant polypeptide variant, or a hyperglycosylated, protease-resistant polypeptide variant and a Type II interferon receptor agonist is effective in reducing the incidence of a disorder associated with cirrhosis of the liver can readily be determined by those skilled in the art.

[0710] Reduction in liver fibrosis increases liver function. Thus, the invention provides methods for increasing liver function, generally involving administering a therapeutically effective combined dosage of a subject synthetic Type I interferon receptor polypeptide agonist, a hyperglycosylated polypeptide variant, a protease-resistant polypeptide variant, or a hyperglycosylated, protease-resistant polypeptide variant and a Type II interferon receptor agonist. Liver functions include, but are not limited to, synthesis of proteins such as serum proteins (e.g., albumin, clotting factors, alkaline phosphatase, aminotransferases (e.g., alanine transaminase, aspartate transaminase), 5′-nucleosidase, γ-glutaminyltranspeptidase, etc.), synthesis of bilirubin, synthesis of cholesterol, and synthesis of bile acids; a liver metabolic function, including, but not limited to, carbohydrate metabolism, amino acid and ammonia metabolism, hormone metabolism, and lipid metabolism; detoxification of exogenous drugs; a hemodynamic function, including splanchnic and portal hemodynamics; and the like.

[0711] Whether a liver function is increased is readily ascertainable by those skilled in the art, using well-established tests of liver function. Thus, synthesis of markers of liver function such as albumin, alkaline phosphatase, alanine transaminase, aspartate transaminase, bilirubin, and the like, can be assessed by measuring the level of these markers in the serum, using standard immunological and enzymatic assays. Splanchnic circulation and portal hemodynamics can be measured by portal wedge pressure and/or resistance using standard methods. Metabolic functions can be measured by measuring the level of ammonia in the serum.

[0712] Whether serum proteins normally secreted by the liver are in the normal range can be determined by measuring the levels of such proteins, using standard immunological and enzymatic assays. Those skilled in the art know the normal ranges for such serum proteins. The following are non-limiting examples. The normal range of alanine transaminase is from about 7 to about 56 units per liter of serum. The normal range of aspartate transaminase is from about 5 to about 40 units per liter of serum. Bilirubin is measured using standard assays. Normal bilirubin levels are usually less than about 1.2 mg/dL. Serum albumin levels are measured using standard assays. Normal levels of serum albumin are in the range of from about 35 to about 55 g/L. Prolongation of prothrombin time is measured using standard assays. Normal prothrombin time is less than about 4 seconds longer than control.

[0713] In another embodiment, a therapeutically effective combination of a subject synthetic Type I interferon receptor polypeptide agonist, a hyperglycosylated polypeptide variant, a protease-resistant polypeptide variant, or a hyperglycosylated, protease-resistant polypeptide variant and a Type II interferon receptor agonist is any combined dosage that is effective to increase liver function by at least about 10%, at least about 20%, at least about 30%, at least about 40%, at least about 50%, at least about 60%, at least about 70%, at least about 80%, or more. For example, a therapeutically effective combination of a subject synthetic Type I interferon receptor polypeptide agonist, a hyperglycosylated polypeptide variant, a protease-resistant polypeptide variant, or a hyperglycosylated, protease-resistant polypeptide variant and a Type II interferon receptor agonist includes any combined dosage that is effective to reduce an elevated level of a serum marker of liver function by at least about 10%, at least about 20%, at least about 30%, at least about 40%, at least about 50%, at least about 60%, at least about 70%, at least about 80%, or more, or to reduce the level of the serum marker of liver function to within a normal range. A therapeutically effective combination of a subject synthetic Type I interferon receptor polypeptide agonist, a hyperglycosylated polypeptide variant, a protease-resistant polypeptide variant, or a hyperglycosylated, protease-resistant polypeptide variant and a Type II interferon receptor agonist also includes any combined dosage effective to increase a reduced level of a serum marker of liver function by at least about 10%, at least about 20%, at least about 30%, at least about 40%, at least about 50%, at least about 60%, at least about 70%, at least about 80%, or more, or to increase the level of the serum marker of liver function to within a normal range.

Renal Fibrosis

[0714] The present invention provides methods of treating renal fibrosis. The methods generally involve administering to an individual having renal fibrosis effective amounts of a subject synthetic Type I interferon receptor polypeptide agonist, a hyperglycosylated polypeptide variant, a protease-resistant polypeptide variant, or a hyperglycosylated, protease-resistant polypeptide variant and a Type II interferon receptor agonist. As used herein, “effective amounts” of a subject synthetic Type I interferon receptor polypeptide agonist, a hyperglycosylated polypeptide variant, a protease-resistant polypeptide variant, or a hyperglycosylated, protease-resistant polypeptide variant and a Type II interferon receptor agonist are any combined dosage that is effective in reducing renal fibrosis; and/or that is effective in reducing the likelihood that an individual will develop renal fibrosis; and/or that is effective in reducing a parameter associated with renal fibrosis; and/or that is effective in reducing a disorder associated with fibrosis of the kidney.

[0715] In one embodiment, effective amounts of a subject synthetic Type I interferon receptor polypeptide agonist, a hyperglycosylated polypeptide variant, a protease-resistant polypeptide variant, or a hyperglycosylated, protease-resistant polypeptide variant and a Type II interferon receptor agonist are any combined dosage that is sufficient to reduce renal fibrosis, or reduce the rate of progression of renal fibrosis, by at least about 10%, at least about 15%, at least about 20%, at least about 25%, at least about 30%, at least about 35%, at least about 40%, at least about 45%, at least about 50%, compared to the degree of renal fibrosis in the individual prior to treatment, or compared to the rate of progression of renal fibrosis that would have been experienced by the patient in the absence of treatment.

[0716] Whether fibrosis is reduced in the kidney is determined using any known method. For example, histochemical analysis of kidney biopsy samples for the extent of ECM deposition and/or fibrosis is performed. Other methods are known in the art. See, e.g., Masseroli et al. (1998) Lab. Invest. 78:511-522; U.S. Pat. No. 6,214,542.

[0717] In some embodiments, effective amounts of a subject synthetic Type I interferon receptor polypeptide agonist, a hyperglycosylated polypeptide variant, a protease-resistant polypeptide variant, or a hyperglycosylated, protease-resistant polypeptide variant and a Type II interferon receptor agonist are any combined dosage that is effective to increase kidney function by at least about 10%, at least about 15%, at least about 20%, at least about 25%, at least about 30%, at least about 35%, at least about 40%, at least about 45%, at least about 50%, compared to the baseline level of kidney function in the individual prior to treatment.

[0718] In some embodiments, effective amounts of a subject synthetic Type I interferon receptor polypeptide agonist, a hyperglycosylated polypeptide variant, a protease-resistant polypeptide variant, or a hyperglycosylated, protease-resistant polypeptide variant and a Type II interferon receptor agonist are any combined dosage that is effective to slow the decline in kidney function by at least about 10%, at least about 15%, at least about 20%, at least about 25%, at least about 30%, at least about 35%, at least about 40%, at least about 45%, at least about 50%, compared to the decline in kidney function that would occur in the absence of treatment.

[0719] Kidney function can be measured using any known assay, including, but not limited to, plasma creatinine level (where normal levels are generally in a range of from about 0.6 to about 1.2 mg/dL); creatinine clearance (where the normal range for creatinine clearance is from about 97 to about 137 mL/minute in men, and from about 88 to about 128 mL/minute in women); the glomerular filtration rate (either calculated or obtained from inulin clearance or other methods), blood urea nitrogen (where the normal range is from about 7 to about 20 mg/dL); and urine protein levels.

Additional Anti-Fibrotic Agents

[0720] Any of the above-described combination therapies for the treatment of a fibrotic disorder can be modified to include co-administration of one or more additional anti-fibrotic agents. Accordingly, the present invention provides a method of treating a fibrotic disorder, generally involving administering a subject synthetic Type I interferon receptor polypeptide agonist, a hyperglycosylated polypeptide variant, a protease-resistant polypeptide variant, or a hyperglycosylated, protease-resistant polypeptide variant and a Type II interferon receptor agonist in combination therapy with at least one additional anti-fibrotic agent. Suitable additional anti-fibrotic agents include, but are not limited to, SAPK inhibitors (e.g., pirfenidone or pirfenidone analogs), TNF antagonists, TGF-β antagonists, endothelin receptor antagonists, and the like.

[0721] As non-limiting examples, any of the above-described treatment methods featuring therapy with a combined dosage of a subject synthetic Type I interferon receptor polypeptide agonist, a hyperglycosylated polypeptide variant, a protease-resistant polypeptide variant, or a hyperglycosylated, protease-resistant polypeptide variant and a Type II interferon receptor agonist effective for the treatment of a fibrotic disorder in a patient can be modified to include co-administration to the patient of an amount of a SAPK inhibitor (e.g., pirfenidone or a pirfenidone analog) effective to augment the anti-fibrotic effect of the synthetic Type I interferon receptor polypeptide agonist and Type II interferon receptor agonist combination therapy, for the desired treatment duration.

[0722] As non-limiting examples, any of the above-described treatment methods featuring therapy with a combined dosage of a subject synthetic Type I interferon receptor polypeptide agonist, a hyperglycosylated polypeptide variant, a protease-resistant polypeptide variant, or a hyperglycosylated, protease-resistant polypeptide variant and a Type II interferon receptor agonist effective for the treatment of a fibrotic disorder in a patient can be modified to include co-administration to the patient of an amount of a TNF antagonist (e.g., etanercept, infliximab, or adalimumab) effective to augment the anti-fibrotic effect of the synthetic Type I interferon receptor polypeptide agonist and Type II interferon receptor agonist combination therapy, for the desired treatment duration.

[0723] As non-limiting examples, any of the above-described treatment methods featuring therapy with a combined dosage of a subject synthetic Type I interferon receptor polypeptide agonist, a hyperglycosylated polypeptide variant, a protease-resistant polypeptide variant, or a hyperglycosylated, protease-resistant polypeptide variant and a Type II interferon receptor agonist effective for the treatment of a fibrotic disorder in a patient can be modified to include co-administration to the patient of an amount of a TGF-β antagonist (e.g., GLEEVEC) effective to augment the anti-fibrotic effect of the synthetic Type I interferon receptor polypeptide agonist and Type II interferon receptor agonist combination therapy, for the desired treatment duration.

[0724] As non-limiting examples, any of the above-described treatment methods featuring therapy with a combined dosage of a subject synthetic Type I interferon receptor polypeptide agonist, a hyperglycosylated polypeptide variant, a protease-resistant polypeptide variant, or a hyperglycosylated, protease-resistant polypeptide variant and a Type II interferon receptor agonist effective for the treatment of a fibrotic disorder in a patient can be modified to include co-administration to the patient of an amount of an endothelin receptor antagonist (e.g., TRACLEER) effective to augment the anti-fibrotic effect of the synthetic Type I interferon receptor polypeptide agonist and Type II interferon receptor agonist combination therapy, for the desired treatment duration.

[0725] As non-limiting examples, any of the above-described treatment methods featuring therapy with a combined dosage of a subject synthetic Type I interferon receptor polypeptide agonist, a hyperglycosylated polypeptide variant, a protease-resistant polypeptide variant, or a hyperglycosylated, protease-resistant polypeptide variant and a Type II interferon receptor agonist effective for the treatment of a fibrotic disorder in a patient can be modified to include co-administration to the patient of a combined dosage of a SAPK inhibitor (e.g., pirfenidone or a pirfenidone analog) and a TNF antagonist (e.g., etancercept, infliximab, or adalimumab) effective to augment the anti-fibrotic effect of the synthetic Type I interferon receptor polypeptide agonist and Type II interferon receptor agonist combination therapy, for the desired treatment duration.

[0726] As non-limiting examples, any of the above-described treatment methods featuring therapy with a combined dosage of a subject synthetic Type I interferon receptor polypeptide agonist, a hyperglycosylated polypeptide variant, a protease-resistant polypeptide variant, or a hyperglycosylated, protease-resistant polypeptide variant and a Type II interferon receptor agonist effective for the treatment of a fibrotic disorder in a patient can be modified to include co-administration to the patient of a combined dosage of a SAPK inhibitor (e.g., pirfenidone or a pirfenidone analog) and a TGF-β antagonist (e.g., GLEEVEC) effective to augment the anti-fibrotic effect of the synthetic Type I interferon receptor polypeptide agonist and Type II interferon receptor agonist combination therapy, for the desired treatment duration.

[0727] As non-limiting examples, any of the above-described treatment methods featuring therapy with a combined dosage of a subject synthetic Type I interferon receptor polypeptide agonist, a hyperglycosylated polypeptide variant, a protease-resistant polypeptide variant, or a hyperglycosylated, protease-resistant polypeptide variant and a Type II interferon receptor agonist effective for the treatment of a fibrotic disorder in a patient can be modified to include co-administration to the patient of a combined dosage of a SAPK inhibitor (e.g., pirfenidone or a pirfenidone analog) and an endothelin receptor antagonist (e.g., TRACLEER) effective to augment the anti-fibrotic effect of the synthetic Type I interferon receptor polypeptide agonist and Type II interferon receptor agonist combination therapy, for the desired treatment duration.

[0728] As non-limiting examples, any of the above-described treatment methods featuring therapy with a combined dosage of a subject synthetic Type I interferon receptor polypeptide agonist, a hyperglycosylated polypeptide variant, a protease-resistant polypeptide variant, or a hyperglycosylated, protease-resistant polypeptide variant and a Type II interferon receptor agonist effective for the treatment of a fibrotic disorder in a patient can be modified to include co-administration to the patient of a combined dosage of a TNF antagonist (e.g., etanercept, infliximab, or adalimumab) and a TGF-β antagonist (e.g., GLEEVEC) effective to augment the anti-fibrotic effect of the synthetic Type I interferon receptor polypeptide agonist and Type II interferon receptor agonist combination therapy, for the desired treatment duration.

[0729] As non-limiting examples, any of the above-described treatment methods featuring therapy with a combined dosage of a subject synthetic Type I interferon receptor polypeptide agonist, a hyperglycosylated polypeptide variant, a protease-resistant polypeptide variant, or a hyperglycosylated, protease-resistant polypeptide variant and a Type II interferon receptor agonist effective for the treatment of a fibrotic disorder in a patient can be modified to include co-administration to the patient of a combined dosage of a TNF antagonist (e.g., etanercept, infliximab, or adalimumab) and an endothelin receptor antagonist (e.g., TRACLEER) effective to augment the anti-fibrotic effect of the synthetic Type I interferon receptor polypeptide agonist and Type II interferon receptor agonist combination therapy, for the desired treatment duration.

[0730] As non-limiting examples, any of the above-described treatment methods featuring therapy with a combined dosage of a subject synthetic Type I interferon receptor polypeptide agonist, a hyperglycosylated polypeptide variant, a protease-resistant polypeptide variant, or a hyperglycosylated, protease-resistant polypeptide variant and a Type II interferon receptor agonist effective for the treatment of a fibrotic disorder in a patient can be modified to include co-administration to the patient of a combined dosage of a TGF-β antagonist (e.g., GLEEVEC) and an endothelin receptor antagonist (e.g., TRACLEER) effective to augment the anti-fibrotic effect of the synthetic Type I interferon receptor polypeptide agonist and Type II interferon receptor agonist combination therapy, for the desired treatment duration.

[0731] As non-limiting examples, any of the above-described treatment methods featuring therapy with a combined dosage of a subject synthetic Type I interferon receptor polypeptide agonist, a hyperglycosylated polypeptide variant, a protease-resistant polypeptide variant, or a hyperglycosylated, protease-resistant polypeptide variant and a Type II interferon receptor agonist effective for the treatment of a fibrotic disorder in a patient can be modified to include co-administration to the patient of a combined dosage of a SAPK inhibitor (e.g., pirfenidone or a pirfenidone analog), TNF antagonist (e.g., etanercept, infliximab, or adalimumab) and a TGF-βantagonist (e.g., GLEEVEC) effective to augment the anti-fibrotic effect of the synthetic Type I interferon receptor polypeptide agonist and Type II interferon receptor agonist combination therapy, for the desired treatment duration.

[0732] As non-limiting examples, any of the above-described treatment methods featuring therapy with a combined dosage of a subject synthetic Type I interferon receptor polypeptide agonist, a hyperglycosylated polypeptide variant, a protease-resistant polypeptide variant, or a hyperglycosylated, protease-resistant polypeptide variant and a Type II interferon receptor agonist effective for the treatment of a fibrotic disorder in a patient can be modified to include co-administration to the patient of a combined dosage of a SAPK inhibitor (e.g., pirfenidone or a pirfenidone analog), TNF antagonist (e.g., etanercept, infliximab, or adalimumab) and an endothelin antagonist (e.g., TRACLEER) effective to augment the anti-fibrotic effect of the synthetic Type I interferon receptor polypeptide agonist and Type II interferon receptor agonist combination therapy, for the desired treatment duration.

[0733] As non-limiting examples, any of the above-described treatment methods featuring therapy with a combined dosage of a subject synthetic Type I interferon receptor polypeptide agonist, a hyperglycosylated polypeptide variant, a protease-resistant polypeptide variant, or a hyperglycosylated, protease-resistant polypeptide variant and a Type II interferon receptor agonist effective for the treatment of a fibrotic disorder in a patient can be modified to include co-administration to the patient of a combined dosage of TNF antagonist (e.g., etanercept, infliximab, or adalimumab), TGF-β antagonist (e.g., GLEEVEC) and an endothelin antagonist (e.g., TRACLEER) effective to augment the anti-fibrotic effect of the synthetic Type I interferon receptor polypeptide agonist and Type II interferon receptor agonist combination therapy, for the desired treatment duration.

[0734] As non-limiting examples, any of the above-described treatment methods featuring therapy with a combined dosage of a subject synthetic Type I interferon receptor polypeptide agonist, a hyperglycosylated polypeptide variant, a protease-resistant polypeptide variant, or a hyperglycosylated, protease-resistant polypeptide variant and a Type II interferon receptor agonist effective for the treatment of a fibrotic disorder in a patient can be modified to include co-administration to the patient of a combined dosage of a SAPK inhibitor (e.g., pirfenidone or a pirfenidone analog), TGF-β antagonist (e.g., GLEEVEC) and an endothelin antagonist (e.g., TRACLEER) effective to augment the anti-fibrotic effect of the synthetic Type I interferon receptor polypeptide agonist and Type II interferon receptor agonist combination therapy, for the desired treatment duration.

[0735] As non-limiting examples, any of the above-described treatment methods featuring therapy with a combined dosage of a subject synthetic Type I interferon receptor polypeptide agonist, a hyperglycosylated polypeptide variant, a protease-resistant polypeptide variant, or a hyperglycosylated, protease-resistant polypeptide variant and a Type II interferon receptor agonist effective for the treatment of a fibrotic disorder in a patient can be modified to include co-administration to the patient of a combined dosage of a SAPK inhibitor (e.g., pirfenidone or a pirfenidone analog), a TNF antagonist (e.g., etanercept, infliximab, or adalimumab), a TGF-β antagonist (e.g., GLEEVEC) and an endothelin antagonist (e.g., TRACLEER) effective to augment the anti-fibrotic effect of the synthetic Type I interferon receptor polypeptide agonist and Type II interferon receptor agonist combination therapy, for the desired treatment duration.

[0736] As non-limiting examples, any of the above-described treatment methods featuring therapy with a combined dosage of a subject synthetic Type I interferon receptor polypeptide agonist, a hyperglycosylated polypeptide variant, a protease-resistant polypeptide variant, or a hyperglycosylated, protease-resistant polypeptide variant and a Type II interferon receptor agonist effective for the treatment of a fibrotic disorder in a patient, with or without co-administration of one or more additional anti-fibrotic agent(s), can be further modified to include co-administration of an amount of N-acetylcysteine (NAC) effective to augment the anti-fibrotic effect of the combination therapy, for the desired treatment duration.

Cancer

[0737] The present invention provides a method of treating a proliferative disorder (e.g., cancer), the method generally involving administering to an individual in need thereof an effective amount of a subject synthetic Type I interferon receptor polypeptide agonist, a hyperglycosylated polypeptide variant, a protease-resistant polypeptide variant, or a hyperglycosylated, protease-resistant polypeptide variant.

[0738] The methods are effective to reduce the growth rate of a tumor by at least about 5%, at least about 10%, at least about 20%, at least about 25%, at least about 50%, at least about 75%, at least about 85%, or at least about 90%, up to total inhibition of growth of the tumor, when compared to a suitable control. Thus, in these embodiments, an “effective amount” of a subject synthetic Type I interferon receptor polypeptide agonist, a hyperglycosylated polypeptide variant, a protease-resistant polypeptide variant, or a hyperglycosylated, protease-resistant polypeptide variant is an amount that is sufficient to reduce tumor growth rate by at least about 5%, at least about 10%, at least about 20%, at least about 25%, at least about 50%, at least about 75%, at least about 85%, or at least about 90%, up to total inhibition of tumor growth, when compared to a suitable control. In an experimental animal system, a suitable control may be a genetically identical animal not treated with the synthetic Type I interferon receptor polypeptide agonist. In non-experimental systems, a suitable control may be the tumor load present before administering the synthetic Type I interferon receptor polypeptide agonist. Other suitable controls may be a placebo control.

[0739] Whether growth of a tumor is inhibited can be determined using any known method, including, but not limited to, a proliferation assay as described in the Example; a ³H-thymidine uptake assay; and the like.

[0740] The methods are useful for treating a wide variety of cancers, including carcinomas, sarcomas, leukemias, and lymphomas.

[0741] Carcinomas that can be treated using a subject method include, but are not limited to, esophageal carcinoma, hepatocellular carcinoma, basal cell carcinoma (a form of skin cancer), squamous cell carcinoma (various tissues), bladder carcinoma, including transitional cell carcinoma (a malignant neoplasm of the bladder), bronchogenic carcinoma, colon carcinoma, colorectal carcinoma, gastric carcinoma, lung carcinoma, including small cell carcinoma and non-small cell carcinoma of the lung, adrenocortical carcinoma, thyroid carcinoma, pancreatic carcinoma, breast carcinoma, ovarian carcinoma, prostate carcinoma, adenocarcinoma, sweat gland carcinoma, sebaceous gland carcinoma, papillary carcinoma, papillary adenocarcinoma, cystadenocarcinoma, medullary carcinoma, renal cell carcinoma, ductal carcinoma in situ or bile duct carcinoma, choriocarcinoma, seminoma, embryonal carcinoma, Wilm's tumor, cervical carcinoma, uterine carcinoma, testicular carcinoma, osteogenic carcinoma, epithelieal carcinoma, and nasopharyngeal carcinoma, etc.

[0742] Sarcomas that can be treated using a subject method include, but are not limited to, fibrosarcoma, myxosarcoma, liposarcoma, chondrosarcoma, chordoma, osteogenic sarcoma, osteosarcoma, angiosarcoma, endotheliosarcoma, lymphangiosarcoma, lymphangioendotheliosarcoma, synovioma, mesothelioma, Ewing's sarcoma, leiomyosarcoma, rhabdomyosarcoma, and other soft tissue sarcomas.

[0743] Other solid tumors that can be treated using a subject method include, but are not limited to, glioma, astrocytoma, medulloblastoma, craniopharyngioma, ependymoma, pinealoma, hemangioblastoma, acoustic neuroma, oligodendroglioma, menangioma, melanoma, neuroblastoma, and retinoblastoma.

[0744] Leukemias that can be treated using a subject method include, but are not limited to, a) chronic myeloproliferative syndromes (neoplastic disorders of multipotential hematopoietic stem cells); b) acute myelogenous leukemias (neoplastic transformation of a multipotential hematopoietic stem cell or a hematopoietic cell of restricted lineage potential; c) chronic lymphocytic leukemias (CLL; clonal proliferation of immunologically immature and functionally incompetent small lymphocytes), including B-cell CLL, T-cell CLL prolymphocytic leukemia, and hairy cell leukemia; and d) acute lymphoblastic leukemias (characterized by accumulation of lymphoblasts). Lymphomas that can be treated using a subject method include, but are not limited to, B-cell lymphomas (e.g., Burkitt's lymphoma); Hodgkin's lymphoma; and the like.

Combination Therapies

[0745] In some embodiments, the present invention provides combination therapies for the treatment of cancer. Accordingly, the present invention provides a method of treating cancer, generally involving administering a subject synthetic Type I interferon receptor polypeptide agonist, a hyperglycosylated polypeptide variant, a protease-resistant polypeptide variant, or a hyperglycosylated, protease-resistant polypeptide variant in combination therapy with at least a second therapeutic agent.

[0746] In other embodiments, the present invention provides methods of treating cancer that involve administering a synergistic combination of a subject synthetic Type I interferon receptor polypeptide agonist, a hyperglycosylated polypeptide variant, a protease-resistant polypeptide variant, or a hyperglycosylated, protease-resistant polypeptide variant and a second therapeutic agent. As used herein, a “synergistic combination” of a subject synthetic Type I interferon receptor polypeptide agonist, a hyperglycosylated polypeptide variant, a protease-resistant polypeptide variant, or a hyperglycosylated, protease-resistant polypeptide variant and a second therapeutic agent is a combined dosage that is more effective in the therapeutic or prophylactic treatment of cancer than the incremental improvement in treatment outcome that could be predicted or expected from a merely additive combination of (i) the therapeutic or prophylactic benefit of a subject synthetic Type I interferon receptor polypeptide agonist, a hyperglycosylated polypeptide variant, a protease-resistant polypeptide variant, or a hyperglycosylated, protease-resistant polypeptide variant when administered at that same dosage as a monotherapy and (ii) the therapeutic or prophylactic benefit of the second therapeutic agent when administered at the same dosage as a monotherapy.

[0747] In some embodiments, a subject synthetic Type I interferon receptor polypeptide agonist, a hyperglycosylated polypeptide variant, a protease-resistant polypeptide variant, or a hyperglycosylated, protease-resistant polypeptide variant is administered as an adjuvant therapy to a standard cancer therapy. Standard cancer therapies include surgery (e.g., surgical removal of cancerous tissue), radiation therapy, bone marrow transplantation, chemotherapeutic treatment, biological response modifier treatment, and certain combinations of the foregoing.

[0748] Radiation therapy includes, but is not limited to, x-rays or gamma rays that are delivered from either an externally applied source such as a beam, or by implantation of small radioactive sources.

[0749] Chemotherapeutic agents are non-peptidic (i.e., non-proteinaceous) compounds that reduce proliferation of cancer cells, and encompass cytotoxic agents and cytostatic agents. Non-limiting examples of chemotherapeutic agents include alkylating agents, nitrosoureas, antimetabolites, antitumor antibiotics, plant (vinca) alkaloids, and steroid hormones.

[0750] Agents that act to reduce cellular proliferation are known in the art and widely used. Such agents include alkylating agents, such as nitrogen mustards, nitrosoureas, ethylenimine derivatives, alkyl sulfonates, and triazenes, including, but not limited to, mechlorethamine, cyclophosphamide (Cytoxan™), melphalan (L-sarcolysin), carmustine (BCNU), lomustine (CCNU), semustine (methyl-CCNU), streptozocin, chlorozotocin, uracil mustard, chlormethine, ifosfamide, chlorambucil, pipobroman, triethylenemelamine, triethylenethiophosphoramine, busulfan, dacarbazine, and temozolomide.

[0751] Antimetabolite agents include folic acid analogs, pyrimidine analogs, purine analogs, and adenosine deaminase inhibitors, including, but not limited to, cytarabine (CYTOSAR-U), cytosine arabinoside, fluorouracil (5-FU), floxuridine (FudR), 6-thioguanine, 6-mercaptopurine (6-MP), pentostatin, 5-fluorouracil (5-FU), methotrexate, 10-propargyl-5,8-dideazafolate (PDDF, CB3717), 5,8-dideazatetrahydrofolic acid (DDATHF), leucovorin, fludarabine phosphate, pentostatine, and gemcitabine.

[0752] Suitable natural products and their derivatives, (e.g., vinca alkaloids, antitumor antibiotics, enzymes, lymphokines, and epipodophyllotoxins), include, but are not limited to, Ara-C, paclitaxel (Taxol®), docetaxel (Taxotere(®), deoxycoformycin, mitomycin-C, L-asparaginase, azathioprine; brequinar; alkaloids, e.g. vincristine, vinblastine, vinorelbine, vindesine, etc.; podophyllotoxins, e.g. etoposide, teniposide, etc.; antibiotics, e.g. anthracycline, daunorubicin hydrochloride (daunomycin, rubidomycin, cerubidine), idarubicin, doxorubicin, epirubicin and morpholino derivatives, etc.; phenoxizone biscyclopeptides, e.g. dactinomycin; basic glycopeptides, e.g. bleomycin; anthraquinone glycosides, e.g. plicamycin (mithramycin); anthracenediones, e.g. mitoxantrone; azirinopyrrolo indolediones, e.g. mitomycin; macrocyclic immunosuppressants, e.g. cyclosporine, FK-506 (tacrolimus, prograf), rapamycin, etc.; and the like.

[0753] Other anti-proliferative cytotoxic agents are navelbene, CPT-11, anastrazole, letrazole, capecitabine, reloxafine, cyclophosphamide, ifosamide, and droloxafine.

[0754] Microtubule affecting agents that have antiproliferative activity are also suitable for use and include, but are not limited to, allocolchicine (NSC 406042), Halichondrin B (NSC 609395), colchicine (NSC 757), colchicine derivatives (e.g., NSC 33410), dolstatin 10 (NSC 376128), maytansine (NSC 153858), rhizoxin (NSC 332598), paclitaxel (Taxol®), Taxol® derivatives, docetaxel (Taxotere®), thiocolchicine (NSC 361792), trityl cysterin, vinblastine sulfate, vincristine sulfate, natural and synthetic epothilones including but not limited to, eopthilone A, epothilone B, discodermolide; estramustine, nocodazole, and the like.

[0755] Hormone modulators and steroids (including synthetic analogs) that are suitable for use include, but are not limited to, adrenocorticosteroids, e.g. prednisone, dexamethasone, etc.; estrogens and pregestins, e.g. hydroxyprogesterone caproate, medroxyprogesterone acetate, megestrol acetate, estradiol, clomiphene, tamoxifen; etc.; and adrenocortical suppressants, e.g. aminoglutethimide; 17α-ethinylestradiol; diethylstilbestrol, testosterone, fluoxymesterone, dromostanolone propionate, testolactone, methylprednisolone, methyl-testosterone, prednisolone, triamcinolone, chlorotrianisene, hydroxyprogesterone, aminoglutethimide, estramustine, medroxyprogesterone acetate, leuprolide, Flutamide (Drogenil), Toremifene (Fareston), and Zoladex®. Estrogens stimulate proliferation and differentiation, therefore compounds that bind to the estrogen receptor are used to block this activity. Corticosteroids may inhibit T cell proliferation.

[0756] Other chemotherapeutic agents include metal complexes, e.g. cisplatin (cis-DDP), carboplatin, etc.; ureas, e.g. hydroxyurea; and hydrazines, e.g N-methylhydrazine; epidophyllotoxin; a topoisomerase inhibitor; procarbazine; mitoxantrone; leucovorin; tegafur; etc.. Other anti-proliferative agents of interest include immunosuppressants, e.g. mycophenolic acid, thalidomide, desoxyspergualin, azasporine, leflunomide, mizoribine, azaspirane (SKF 105685); Iressa® (ZD 1839, 4-(3-chloro-4-fluorophenylamino)-7-methoxy-6-(3-(4-morpholinyl)propoxy)quinazoline); etc.

[0757] “Taxanes” include paclitaxel, as well as any active taxane derivative or pro-drug. “Paclitaxel” (which should be understood herein to include analogues, formulations, and derivatives such as, for example, docetaxel, TAXOL™, TAXOTERE™ (a formulation of docetaxel), 10-desacetyl analogs of paclitaxel and 3′N-desbenzoyl-3N-t-butoxycarbonyl analogs of paclitaxel) may be readily prepared utilizing techniques known to those skilled in the art (see also WO 94/07882, WO 94/07881, WO 94/07880, WO 94/07876, WO 93/23555, WO 93/10076; U.S. Pat. Nos. 5,294,637; 5,283,253; 5,279,949; 5,274,137; 5,202,448; 5,200,534; 5,229,529; and EP 590,267), or obtained from a variety of commercial sources, including for example, Sigma Chemical Co., St. Louis, Mo. (T7402 from Taxus brevifolia; or T-1912 from Taxus yannanensis).

[0758] Paclitaxel should be understood to refer to not only the common chemically available form of paclitaxel, but analogs and derivatives (e.g., Taxotere™ docetaxel, as noted above) and paclitaxel conjugates (e.g., paclitaxel-PEG, paclitaxel-dextran, or paclitaxel-xylose).

[0759] Also included within the term “taxane” are a variety of known derivatives, including both hydrophilic derivatives, and hydrophobic derivatives. Taxane derivatives include, but not limited to, galactose and mannose derivatives described in International Patent Application No. WO 99/18113; piperazino and other derivatives described in WO 99/14209; taxane derivatives described in WO 99/09021, WO 98/22451, and U.S. Pat. No. 5,869,680; 6-thio derivatives described in WO 98/28288; sulfenamide derivatives described in U.S. Pat. No. 5,821,263; and taxol derivative described in U.S. Pat. No. 5,415,869. It further includes prodrugs of paclitaxel including, but not limited to, those described in WO 98/58927; WO 98/13059; and U.S. Pat. No. 5,824,701.

[0760] Biological response modifiers suitable for use in connection with the methods of the invention include, but are not limited to, (1) inhibitors of tyrosine kinase (RTK) activity; (2) inhibitors of serine/threonine kinase activity; (3) tumor-associated antigen antagonists, such as antibodies that bind specifically to a tumor antigen; (4) apoptosis receptor agonists; (5) interleukin-2; (6) IFN-α; (7) IFN-γ (8) colony-stimulating factors; and (9) inhibitors of angiogenesis.

[0761] In one aspect, the invention contemplates the combination of a subject synthetic Type I interferon receptor polypeptide agonist, a hyperglycosylated polypeptide variant, a protease-resistant polypeptide variant, or a hyperglycosylated, protease-resistant polypeptide variant as an adjuvant to any therapy in which the cancer patient receives treatment with at least one additional antineoplastic drug, where the additional drug is a tyrosine kinase inhibitor. In some embodiments, the tyrosine kinase inhibitor is a receptor tyrosine kinase (RTK) inhibitor, such as type I receptor tyrosine kinase inhibitors (e.g., inhibitors of epidermal growth factor receptors), type II receptor tyrosine kinase inhibitors (e.g., inhibitors of insulin receptor), type III receptor tyrosine kinase inhibitors (e.g., inhibitors of platelet-derived growth factor receptor), and type IV receptor tyrosine kinase inhibitors (e.g., fibroblast growth factor receptor). In other embodiments, the tyrosine kinase inhibitor is a non-receptor tyrosine kinase inhibitor, such as inhibitors of src kinases or janus kinases.

[0762] In another aspect, the invention contemplates the combination of a subject synthetic Type I interferon receptor polypeptide agonist, a hyperglycosylated polypeptide variant, a protease-resistant polypeptide variant, or a hyperglycosylated, protease-resistant polypeptide variant as an adjuvant to any therapy in which the cancer patient receives treatment with at least one additional antineoplastic drug, where the additional drug is an inhibitor of a receptor tyrosine kinase involved in growth factor signaling pathway(s). In some embodiments, the inhibitor is genistein. In other embodiments, the inhibitor is an EGFR tyrosine kinase-specific antagonist, such as IRESSA™ gefitinib (ZD18398; Novartis), TARCEVA™ erolotinib (OSI-774; Roche; Genentech; OSI Pharmaceuticals), or tyrphostin AG1478 (4-(3-chloroanilino)-6,7-dimethoxyquinazoline. In still other embodiments, the inhibitor is any indolinone antagonist of Flk-1/KDR (VEGF-R2) tyrosine kinase activity described in U.S. Patent Application Publication No. 2002/0183364 A1, such as the indolinone antagonists of Flk-1/KDR (VEGF-R2) tyrosine kinase activity disclosed in Table 1 on pages 4-5 thereof. In further embodiments, the inhibitor is any of the substituted 3-[(4,5,6,7-tetrahydro-1H-indol-2-yl) methylene]-1,3-dihydroindol-2-one antagonists of Flk-1/KDR (VEGF-R2), FGF-R1 or PDGF-R tyrosine kinase activity disclosed in Sun, L., et al., J. Med. Chem., 43(14): 2655-2663 (2000). In additional embodiments, the inhibitor is any substituted 3-[(3- or 4-carboxyethylpyrrol-2-yl) methylidenyl]indolin-2-one antagonist of Flt-1 (VEGF-R1), Flk-1/KDR (VEGF-R2), FGF-R1 or PDGF-R tyrosine kinase activity disclosed in Sun, L., et al., J. Med. Chem., 42(25): 5120-5130 (1999).

[0763] In another aspect, the invention contemplates the combination of a subject synthetic Type I interferon receptor polypeptide agonist, a hyperglycosylated polypeptide variant, a protease-resistant polypeptide variant, or a hyperglycosylated, protease-resistant polypeptide variant as an adjuvant to any therapy in which the cancer patient receives treatment with at least one additional antineoplastic drug, where the additional drug is an inhibitor of a non-receptor tyrosine kinase involved in growth factor signaling pathway(s). In some embodiments, the inhibitor is an antagonist of JAK2 tyrosine kinase activity, such as tyrphostin AG490 (2-cyano-3-(3,4-dihydroxyphenyl)-N-(benzyl)-2-propenamide). In other embodiments, the inhibitor is an antagonist of bcr-abl tyrosine kinase activity, such as GLEEVEC™ imatinib mesylate (STI-571; Novartis).

[0764] In another aspect, the invention contemplates the combination of a subject synthetic Type I interferon receptor polypeptide agonist, a hyperglycosylated polypeptide variant, a protease-resistant polypeptide variant, or a hyperglycosylated, protease-resistant polypeptide variant as an adjuvant to any therapy in which the cancer patient receives treatment with at least one additional antineoplastic drug, where the additional drug is an inhibitor of one or more kinases involved in cell cycle regulation. In some embodiments, the inhibitor is an antagonist of CDK2 activation, such as tryphostin AG490 (2-cyano-3-(3,4-dihydroxyphenyl)-N-(benzyl)-2-propenamide). In other embodiments, the inhibitor is an antagonist of CDK1/cyclin B activity, such as alsterpaullone. In still other embodiments, the inhibitor is an antagonist of CDK2 kinase activity, such as indirubin-3′-monoxime. In additional embodiments, the inhibitor is an ATP pool antagonist, such as lometrexol (described in U.S. Patent Application Publication No. 2002/0156023 A1).

[0765] In another aspect, the invention contemplates the combination of a subject synthetic Type I interferon receptor polypeptide agonist, a hyperglycosylated polypeptide variant, a protease-resistant polypeptide variant, or a hyperglycosylated, protease-resistant polypeptide variant as an adjuvant to any therapy in which the cancer patient receives treatment with at least one additional antineoplastic drug, where the additional drug is a tumor-associated antigen antagonist, such as an antibody antagonist. In some embodiments involving the treatment of HER2-expressing tumors, the tumor-associated antigen antagonist is an anti-HER2 monoclonal antibody, such as HERCEPTIN™ trastuzumab. In some embodiments involving the treatment of CD20-expressing tumors, such as B-cell lymphomas, the tumor-associated antigen antagonist is an anti-CD20 monoclonal antibody, such as RITUXAN™ rituximab.

[0766] In another aspect, the invention contemplates the combination of a subject synthetic Type I interferon receptor polypeptide agonist, a hyperglycosylated polypeptide variant, a protease-resistant polypeptide variant, or a hyperglycosylated, protease-resistant polypeptide variant as an adjuvant to any therapy in which the cancer patient receives treatment with at least one additional antineoplastic drug, where the additional drug is a tumor growth factor antagonist. In some embodiments, the tumor growth factor antagonist is an antagonist of epidermal growth factor (EGF), such as an anti-EGF monoclonal antibody. In other embodiments, the tumor growth factor antagonist is an antagonist of epidermal growth factor receptor erbB1 (EGFR), such as an anti-EGFR monoclonal antibody inhibitor of EGFR activation or signal transduction, e.g. ERBITUX™ cetuximab.

[0767] In another aspect, the invention contemplates the combination of a subject synthetic Type I interferon receptor polypeptide agonist, a hyperglycosylated polypeptide variant, a protease-resistant polypeptide variant, or a hyperglycosylated, protease-resistant polypeptide variant as an adjuvant to any therapy in which the cancer patient receives treatment with at least one additional antineoplastic drug, where the additional drug is an Apo-2 ligand agonist. In some embodiments, the Apo-2 ligand agonist is any of the Apo-2 ligand polypeptides described in WO 97/25428.

[0768] In another aspect, the invention contemplates the combination of a subject synthetic Type I interferon receptor polypeptide agonist, a hyperglycosylated polypeptide variant, a protease-resistant polypeptide variant, or a hyperglycosylated, protease-resistant polypeptide variant as an adjuvant to any therapy in which the cancer patient receives treatment with at least one additional antineoplastic drug, where the additional drug is an anti-angiogenic agent. In some embodiments, the anti-angiogenic agent is a vascular endothelial cell growth factor (VEGF) antagonist, such as an anti-VEGF monoclonal antibody, e.g. AVASTIN™ bevacizumab (Genentech). In other embodiments, the anti-angiogenic agent is an antagonist of VEGF-R1, such as an anti-VEGF-R1 monoclonal antibody. In other embodiments, the anti-angiogenic agent is an antagonist of VEGF-R2, such as an anti-VEGF-R2 monoclonal antibody. In other embodiments, the anti-angiogenic agent is an antagonist of basic fibroblast growth factor (bFGF), such as an anti-bFGF monoclonal antibody. In other embodiments, the anti-angiogenic factor is an antagonist of bFGF receptor, such as an anti-bFGF receptor monoclonal antibody. In other embodiments, the anti-angiogenic agent is an antagonist of TGF-β, such as an anti-TGF-β monoclonal antibody. In other embodiments, the anti-angiogenic agent is an antagonist of TGF-β receptor, such as an anti-TGF-β receptor monoclonal antibody. In other embodiments, the anti-angiogenic agent is a retinoic acid receptor (RXR) ligand, such as any RXR ligand described in U.S. Patent Application Publication No. 2001/0036955 A1 or in any of U.S. Pat. Nos. 5,824,685; 5,780,676; 5,399,586; 5,466,861; 4,810,804; 5,770,378; 5,770,383; or 5,770,382. In still other embodiments, the anti-angiogenic agent is a peroxisome proliferator-activated receptor (PPAR) gamma ligand, such as any PPAR gamma ligand described in U.S. Patent Application Publication No. 2001/0036955 A1.

[0769] As non-limiting examples, any of the above-described treatment methods featuring therapy with an effective amount of a subject synthetic Type I interferon receptor polypeptide agonist, a hyperglycosylated polypeptide variant, a protease-resistant polypeptide variant, or a hyperglycosylated, protease-resistant polypeptide variant for the treatment of cancer in a patient can be modified to include co-administration to the patient of an amount of IFN-γeffective to augment the anti-cancer effect of the synthetic Type I interferon receptor polypeptide agonist therapy, for the desired treatment duration.

[0770] As non-limiting examples, any of the above-described treatment methods featuring therapy with an effective amount of a subject synthetic Type I interferon receptor polypeptide agonist, a hyperglycosylated polypeptide variant, a protease-resistant polypeptide variant, or a hyperglycosylated, protease-resistant polypeptide variant for the treatment of cancer in a patient can be modified to include co-administration to the patient of an amount of a SAPK inhibitor (e.g., pirfenidone or a pirfenidone analog) effective to augment the anti-cancer effect of the synthetic Type I interferon receptor polypeptide agonist therapy, for the desired treatment duration.

[0771] As non-limiting examples, any of the above-described treatment methods featuring therapy with an effective amount of a subject synthetic Type I interferon receptor polypeptide agonist, a hyperglycosylated polypeptide variant, a protease-resistant polypeptide variant, or a hyperglycosylated, protease-resistant polypeptide variant for the treatment of cancer in a patient can be modified to include co-administration to the patient of an amount of IFN-γand an amount of a SAPK inhibitor (e.g., pirfenidone or a pirfenidone analog) effective to augment the anti-cancer effect of the synthetic Type I interferon receptor polypeptide agonist therapy, for the desired treatment duration.

[0772] As non-limiting examples, any of the above-described treatment methods featuring combination therapy with an amount of a subject synthetic Type I interferon receptor polypeptide agonist, a hyperglycosylated polypeptide variant, a protease-resistant polypeptide variant, or a hyperglycosylated, protease-resistant polypeptide variant and an amount of an additional anti-cancer agent, other than IFN-γ, effective for the treatment of cancer in a patient can be modified to include co-administration to the patient of an amount of IFN-γ effective to augment the anti-cancer effect of the synthetic Type I interferon receptor polypeptide agonist and additional anti-cancer agent combination therapy, for the desired treatment duration.

[0773] As non-limiting examples, any of the above-described treatment methods featuring combination therapy with an amount of a subject synthetic Type I interferon receptor polypeptide agonist, a hyperglycosylated polypeptide variant, a protease-resistant polypeptide variant, or a hyperglycosylated, protease-resistant polypeptide variant and an amount of an additional anti-cancer agent, other than a SAPK inhibitor (e.g., pirfenidone or a pirfenidone analog), effective for the treatment of cancer in a patient can be modified to include co-administration to the patient of an amount of a SAPK inhibitor (e.g., pirfenidone or a pirfenidone analog) effective to augment the anti-cancer effect of the synthetic Type I interferon receptor polypeptide agonist and additional anti-cancer agent combination therapy, for the desired treatment duration.

[0774] As non-limiting examples, any of the above-described treatment methods featuring combination therapy with an amount of a subject synthetic Type I interferon receptor polypeptide agonist, a hyperglycosylated polypeptide variant, a protease-resistant polypeptide variant, or a hyperglycosylated, protease-resistant polypeptide variant and an amount of an additional anti-cancer agent, other than IFN-γ or a SAPK inhibitor (e.g., pirfenidone or a pirfenidone analog), effective for the treatment of cancer in a patient can be modified to include co-administration to the patient of an amount of IFN-γ and an amount of a SAPK inhibitor (e.g., pirfenidone or a pirfenidone analog) that are effective to augment the anti-cancer effect of the synthetic Type I interferon receptor polypeptide agonist and additional anti-cancer agent combination therapy, for the desired treatment duration.

Viral Infections

[0775] The present invention provides methods of treating a virus infection, and methods of reducing viral load, or reducing the time to viral clearance, or reducing morbidity or mortality in the clinical outcomes, in patients suffering from a virus infection. The present invention further provides methods of reducing the risk that an individual will develop a pathological viral infection that has clinical sequelae. The methods generally involve administering a therapeutically effective amount of a subject synthetic Type I interferon receptor polypeptide agonist, a hyperglycosylated polypeptide variant, a protease-resistant polypeptide variant, or a hyperglycosylated, protease-resistant polypeptide variant for the treatment of a virus infection.

[0776] In some embodiments, a subject treatment method is prophylactic. Where a subject treatment method is prophylactic, the methods reduce the risk that an individual will develop pathological infection with a virus. An effective amount of a subject synthetic Type I interferon receptor polypeptide agonist, a hyperglycosylated polypeptide variant, a protease-resistant polypeptide variant, or a hyperglycosylated, protease-resistant polypeptide variant is an amount that reduces the risk or reduces the probability that an individual will develop a pathological infection with a virus. For example, an effective amount reduces the risk that an individual will develop a pathological infection by at least about 10%, at least about 20%, at least about 25%, at least about 30%, at least about 35%, at least about 40%, at least about 50%, at least about 60%, at least about 70%, at least about 80%, at least about 90%, or more, compared to the risk of developing a pathological infection with the virus in the absence of treatment with a subject agent.

[0777] In some embodiments, an effective amount of a subject synthetic Type I interferon receptor polypeptide agonist, a hyperglycosylated polypeptide variant, a protease-resistant polypeptide variant, or a hyperglycosylated, protease-resistant polypeptide variant is an amount that reduces viral load by at least about 10%, at least about 20%, at least about 25%, at least about 30%, at least about 35%, at least about 40%, at least about 50%, at least about 60%, at least about 70%, at least about 80%, at least about 90%, or more, compared to the viral load in the absence of treatment with the subject agent.

[0778] In some embodiments, an effective amount of a subject synthetic Type I interferon receptor polypeptide agonist, a hyperglycosylated polypeptide variant, a protease-resistant polypeptide variant, or a hyperglycosylated, protease-resistant polypeptide variant is an amount that that reduces the time to viral clearance, by at least about 10%, at least about 20%, at least about 25%, at least about 30%, at least about 35%, at least about 40%, at least about 50%, at least about 60%, at least about 70%, at least about 80%, at least about 90%, or more, compared to the time to viral clearance in the absence of treatment.

[0779] In some embodiments, an effective amount of a subject synthetic Type I interferon receptor polypeptide agonist, a hyperglycosylated polypeptide variant, a protease-resistant polypeptide variant, or a hyperglycosylated, protease-resistant polypeptide variant is an amount that reduces morbidity or mortality due to a virus infection by at least about 10%, at least about 20%, at least about 25%, at least about 30%, at least about 35%, at least about 40%, at least about 50%, at least about 60%, at least about 70%, at least about 80%, at least about 90%, or more, compared to the morbidity or mortality in the absence of treatment.

[0780] Whether a subject treatment method is effective in reducing the risk of a pathological virus infection, reducing viral load, reducing time to viral clearance, or reducing morbidity or mortality due to a virus infection is readily determined by those skilled in the art. Viral load is readily measured by measuring the titer or level of virus in serum. The number of virus in the serum can be determined using any known assay, including, e.g., a quantitative polymerase chain reaction assay using oligonucleotide primers specific for the virus being assayed. Whether morbidity is reduced can be determined by measuring any symptom associated with a virus infection, including, e.g., fever, respiratory symptoms (e.g., cough, ease or difficulty of breathing, and the like.)

[0781] In some embodiments, the present invention provides a method of reducing viral load, and/or reducing the time to viral clearance, and/or reducing morbidity or mortality in an individual who has been exposed to a virus (e.g., an individual who has come into contact with an individual infected with a virus), the method involving administering an effective amount of subject synthetic Type I interferon receptor polypeptide agonist. In these embodiments, therapy is begun from about 1 hour to about 14 days following exposure, e.g., from about 1 hour to about 24 hours, from about 24 hours to about 48 hours, from about 48 hours to about 3 days, from about 3 days to about 4 days, from about 4 days to about 7 days, from about 7 days to about 10 days, or from about 10 days to about 14 days following exposure to the virus.

[0782] In some embodiments, the present invention provides a method of reducing the risk that an individual who has been exposed to a virus (e.g., an individual who has come into contact with an individual infected with a virus) will develop a pathological virus infection with clinical sequelae, the method involving administering an effective amount of a subject synthetic Type I interferon receptor polypeptide agonist, a hyperglycosylated polypeptide variant, a protease-resistant polypeptide variant, or a hyperglycosylated, protease-resistant polypeptide variant. In these embodiments, therapy is begun from about 1 hour to about 35 days following exposure, e.g., from about 1 hour to about 24 hours, from about 24 hours to about 48 hours, from about 48 hours to about 3 days, from about 3 days to about 4 days, from about 4 days to about 7 days, from about 7 days to about 10 days, from about 10 days to about 14 days, from about 14 days to about 21 days, or from about 21 days to about 35 days following exposure to the virus.

[0783] In some embodiments, the present invention provides methods of reducing viral load, and/or reducing the time to viral clearance, and/or reducing morbidity or mortality in an individual who may or may not have been infected with a virus, and who has been exposed to a virus. In some of these embodiments, the methods involve administering an effective amount of a subject synthetic Type I interferon receptor polypeptide agonist, a hyperglycosylated polypeptide variant, a protease-resistant polypeptide variant, or a hyperglycosylated, protease-resistant polypeptide variant within 24 hours of exposure to the virus.

[0784] In some embodiments, the present invention provides methods of reducing viral load, and/or reducing the time to viral clearance, and/or reducing morbidity or mortality in an individual who has not been infected with a virus, and who has been exposed to a virus. In some of these embodiments, the methods involve administering effective amounts of a SAPK inhibitor (e.g., pirfenidone or a pirfenidone analog) and a Type I interferon receptor agonist within 48 hours of exposure to the virus.

[0785] In some embodiments, the present invention provides methods of reducing viral load, and/or reducing the time to viral clearance, and/or reducing morbidity or mortality in an individual who has not been infected with a virus, and who has been exposed to a virus. The methods involve administering a subject agent more than 48 hours after exposure to the virus, e.g., from 72 hours to about 35 days, e.g., 72 hours, 4 days, 5 days, 6 days, or 7 days after exposure, or from about 7 days to about 10 days, from about 10 days to about 14 days, from about 14 days to about 17 days, from about 17 days to about 21 days, from about 21 days to about 25 days, from about 25 days to about 30 days, or from about 30 days to about 35 days after exposure to the virus. In some of these embodiments, the methods involve administering an effective amount of a subject synthetic Type I interferon receptor polypeptide agonist, a hyperglycosylated polypeptide variant, a protease-resistant polypeptide variant, or a hyperglycosylated, protease-resistant polypeptide variant more than 48 hours after exposure to the virus.

[0786] In some embodiments, the present invention provides a method of reducing the risk that an individual who has been exposed to a virus will develop a pathological virus infection with clinical sequelae. In some of these embodiments, the methods involve administering an effective amount of a subject synthetic Type I interferon receptor polypeptide agonist, a hyperglycosylated polypeptide variant, a protease-resistant polypeptide variant, or a hyperglycosylated, protease-resistant polypeptide variant within 24 hours of exposure to the virus.

[0787] In some embodiments, the present invention provides a method of reducing the risk that an individual who has been exposed to a virus (e.g., an individual who has come into contact with an individual infected with a virus) will develop a pathological viral infection with clinical sequelae. In some of these embodiments, the methods involve administering an effective amount of a subject synthetic Type I interferon receptor polypeptide agonist, a hyperglycosylated polypeptide variant, a protease-resistant polypeptide variant, or a hyperglycosylated, protease-resistant polypeptide variant within 48 hours of exposure to the virus.

Hepatitis Virus Infection

[0788] The present invention provides methods of treating a hepatitis virus infection. In particular embodiments, the present invention provides methods of treating a hepatitis C virus (HCV) infection; methods of reducing the incidence of complications associated with HCV and cirrhosis of the liver; and methods of reducing viral load, or reducing the time to viral clearance, or reducing morbidity or mortality in the clinical outcomes, in patients suffering from HCV infection. The methods generally involve administering to the individual an effective amount of a subject synthetic Type I interferon receptor polypeptide agonist, a hyperglycosylated polypeptide variant, a protease-resistant polypeptide variant, or a hyperglycosylated, protease-resistant polypeptide variant.

[0789] In many embodiments, a subject treatment method is effective to decrease viral load in the individual, and to achieve a sustained viral response. Optionally, the subject method further provides administering to the individual an effective amount of a nucleoside analog, such as ribavirin, levovirin, and viramidine. Of particular interest in many embodiments is treatment of humans.

[0790] Whether a subject method is effective in treating an HCV infection can be determined by measuring viral load, or by measuring a parameter associated with HCV infection, including, but not limited to, liver fibrosis, elevations in serum transaminase levels, and necroinflammatory activity in the liver. Indicators of liver fibrosis are discussed in detail below.

[0791] Viral load can be measured by measuring the titer or level of virus in serum. These methods include, but are not limited to, a quantitative polymerase chain reaction (PCR) and a branched DNA (bDNA) test. Quantitative assays for measuring the viral load (titer) of HCV RNA have been developed. Many such assays are available commercially, including a quantitative reverse transcription PCR (RT-PCR) (Amplicor HCV Monitor™, Roche Molecular Systems, New Jersey); and a branched DNA (deoxyribonucleic acid) signal amplification assay (Quantiplex™ HCV RNA Assay (bDNA), Chiron Corp., Emeryville, Calif.). See, e.g., Gretch et al. (1995) Ann. Intern. Med. 123:321-329. Also of interest is a nucleic acid test (NAT), developed by Gen-Probe Inc. (San Diego) and Chiron Corporation, and sold by Chiron Corporation under the trade name Procleix®, which NAT simultaneously tests for the presence of HIV-1 and HCV. See, e.g., Vargo et al. (2002) Transfusion 42:876-885.

[0792] In general, an effective amount of a subject agent (e.g., a subject synthetic Type I interferon receptor polypeptide agonist, a hyperglycosylated polypeptide variant, a protease-resistant polypeptide variant, or a hyperglycosylated, protease-resistant polypeptide variant) is an amount that is effective to reduce viral load to undetectable levels, e.g., to less than about 5000, less than about 1000, less than about 500, or less than about 200 genome copies/mL serum. In some embodiments, an effective amount of a subject agent is an amount that is effective to reduce viral load to less than 100 genome copies/mL serum. In many embodiments, the methods of the invention achieve a sustained viral response, e.g., the viral load is reduced to undetectable levels for a period of at least about one month, at least about two months, at least about three months, at least about four months, at least about five months, or at least about six months following cessation of treatment.

[0793] Whether a subject method is effective in treating an HCV infection can be determined by measuring a parameter associated with HCV infection, such as liver fibrosis. Methods of determining the extent of liver fibrosis are discussed in detail below. In some embodiments, the level of a serum marker of liver fibrosis indicates the degree of liver fibrosis.

[0794] As one non-limiting example, levels of serum alanine aminotransferase (ALT) are measured, using standard assays. In general, an ALT level of less than about 45 international units is considered normal. In some embodiments, an effective amount of a therapeutic agent that is administered as part of a subject combination therapy is an amount effective to reduce ALT levels to less than about 45 U/ml serum.

Combination Therapies

[0795] In some embodiments, the present invention provides combination therapies for the treatment of a viral infection. Accordingly, the present invention provides a method of treating a viral infection, generally involving administering a subject synthetic Type I interferon receptor polypeptide agonist, a hyperglycosylated polypeptide variant, a protease-resistant polypeptide variant, or a hyperglycosylated, protease-resistant polypeptide variant in combination therapy with at least a second therapeutic agent. Suitable additional therapeutic agents include, but are not limited to, nucleoside analogs such as ribavirin and viramidine, L-nucleosides such as levovirin, Type II interferon receptor agonists (e.g., IFN-γ), TNF antagonists, thymosin-α, SAPK inhibitors (e.g., pirfenidone or pirfenidone analogs), amantidine, and the like. In connection with combination therapies for the treatment of HCV infection, suitable additional therapeutic agents include, but are not limited to, nucleoside analogs such as ribavirin, levovirin, and viramidine, Type II interferon receptor agonists (e.g., IFN-γ), TNF antagonists, NS3 inhibitors, NS5B inhibitors, alpha-glucosidase inhibitors, thymosin-α, SAPK inhibitors (e.g., pirfenidone or pirfenidone analogs), amantidine, and the like.

[0796] As non-limiting examples, any of the above-described treatment methods featuring therapy with an effective amount of a subject synthetic Type I interferon receptor polypeptide agonist, a hyperglycosylated polypeptide variant, a protease-resistant polypeptide variant, or a hyperglycosylated, protease-resistant polypeptide variant for the treatment of viral infection, e.g. HCV infection, in a patient can be modified to include co-administration to the patient of an amount of IFN-γ effective to augment the anti-viral effect of the synthetic Type I interferon receptor polypeptide agonist therapy, for the desired treatment duration.

[0797] As non-limiting examples, any of the above-described treatment methods featuring therapy with an effective amount of a subject synthetic Type I interferon receptor polypeptide agonist, a hyperglycosylated polypeptide variant, a protease-resistant polypeptide variant, or a hyperglycosylated, protease-resistant polypeptide variant for the treatment of viral infection, e.g. HCV infection, in a patient can be modified to include co-administration to the patient of an amount of a SAPK inhibitor (e.g., pirfenidone or a pirfenidone analog) effective to augment the anti-viral effect of the synthetic Type I interferon receptor polypeptide agonist therapy, for the desired treatment duration.

[0798] As non-limiting examples, any of the above-described treatment methods featuring therapy with an effective amount of a subject synthetic Type I interferon receptor polypeptide agonist, a hyperglycosylated polypeptide variant, a protease-resistant polypeptide variant, or a hyperglycosylated, protease-resistant polypeptide variant for the treatment of viral infection, e.g. HCV infection, in a patient can be modified to include co-administration to the patient of an amount of a nucleoside analog effective to augment the anti-viral effect of the synthetic Type I interferon receptor polypeptide agonist therapy, for the desired treatment duration.

[0799] As non-limiting examples, any of the above-described treatment methods featuring therapy with an effective amount of a subject synthetic Type I interferon receptor polypeptide agonist, a hyperglycosylated polypeptide variant, a protease-resistant polypeptide variant, or a hyperglycosylated, protease-resistant polypeptide variant for the treatment of viral infection, e.g. HCV infection, in a patient can be modified to include co-administration to the patient of an amount of ribavirin effective to augment the anti-viral effect of the synthetic Type I interferon receptor polypeptide agonist therapy, for the desired treatment duration.

[0800] As non-limiting examples, any of the above-described treatment methods featuring therapy with an effective amount of a subject synthetic Type I interferon receptor polypeptide agonist, a hyperglycosylated polypeptide variant, a protease-resistant polypeptide variant, or a hyperglycosylated, protease-resistant polypeptide variant for the treatment of viral infection, e.g. HCV infection, in a patient can be modified to include co-administration to the patient of an amount of an L-nucleoside (e.g., levovirin) effective to augment the anti-viral effect of the synthetic Type I interferon receptor polypeptide agonist therapy, for the desired treatment duration.

[0801] As non-limiting examples, any of the above-described treatment methods featuring therapy with an effective amount of a subject synthetic Type I interferon receptor polypeptide agonist, a hyperglycosylated polypeptide variant, a protease-resistant polypeptide variant, or a hyperglycosylated, protease-resistant polypeptide variant for the treatment of viral infection, e.g. HCV infection, in a patient can be modified to include co-administration to the patient of an amount of viramidine effective to augment the anti-viral effect of the synthetic Type I interferon receptor polypeptide agonist therapy, for the desired treatment duration.

[0802] As non-limiting examples, any of the above-described treatment methods featuring therapy with an effective amount of a subject synthetic Type I interferon receptor polypeptide agonist, a hyperglycosylated polypeptide variant, a protease-resistant polypeptide variant, or a hyperglycosylated, protease-resistant polypeptide variant for the treatment of viral infection, e.g. HCV infection, in a patient can be modified to include co-administration to the patient of an amount of a TNF antagonist (e.g. etanercept, infliximab or adalimumab) effective to augment the anti-viral effect of the synthetic Type I interferon receptor polypeptide agonist therapy, for the desired treatment duration.

[0803] As non-limiting examples, any of the above-described treatment methods featuring therapy with an effective amount of a subject synthetic Type I interferon receptor polypeptide agonist, a hyperglycosylated polypeptide variant, a protease-resistant polypeptide variant, or a hyperglycosylated, protease-resistant polypeptide variant for the treatment of viral infection, e.g. HCV infection, in a patient can be modified to include co-administration to the patient of an amount of thymosin-α effective to augment the anti-viral effect of the synthetic Type I interferon receptor polypeptide agonist therapy, for the desired treatment duration.

[0804] As non-limiting examples, any of the above-described treatment methods featuring therapy with an effective amount of a subject synthetic Type I interferon receptor polypeptide agonist, a hyperglycosylated polypeptide variant, a protease-resistant polypeptide variant, or a hyperglycosylated, protease-resistant polypeptide variant for the treatment of an HCV infection in a patient can be modified to include co-administration to the patient of an amount of an NS3 inhibitor effective to augment the anti-viral effect of the synthetic Type I interferon receptor polypeptide agonist therapy, for the desired treatment duration.

[0805] As non-limiting examples, any of the above-described treatment methods featuring therapy with an effective amount of a subject synthetic Type I interferon receptor polypeptide agonist, a hyperglycosylated polypeptide variant, a protease-resistant polypeptide variant, or a hyperglycosylated, protease-resistant polypeptide variant for the treatment of an HCV infection in a patient can be modified to include co-administration to the patient of an amount of an NS5B inhibitor effective to augment the anti-viral effect of the synthetic Type I interferon receptor polypeptide agonist therapy, for the desired treatment duration.

[0806] As non-limiting examples, any of the above-described treatment methods featuring therapy with an effective amount of a subject synthetic Type I interferon receptor polypeptide agonist, a hyperglycosylated polypeptide variant, a protease-resistant polypeptide variant, or a hyperglycosylated, protease-resistant polypeptide variant for the treatment of an HCV infection in a patient can be modified to include co-administration to the patient of an amount of an alpha-glucosidase inhibitor effective to augment the anti-viral effect of the synthetic Type I interferon receptor polypeptide agonist therapy, for the desired treatment duration.

[0807] As non-limiting examples, any of the above-described treatment methods featuring therapy with an effective amount of a subject synthetic Type I interferon receptor polypeptide agonist, a hyperglycosylated polypeptide variant, a protease-resistant polypeptide variant, or a hyperglycosylated, protease-resistant polypeptide variant for the treatment of viral infection (e.g., HCV infection) in a patient can be modified to include co-administration to the patient of an amount of IFN-γ and an amount of a SAPK inhibitor (e.g., pirfenidone or a pirfenidone analog) effective to augment the anti-viral effect of the synthetic Type I interferon receptor polypeptide agonist therapy, for the desired treatment duration.

[0808] As non-limiting examples, any of the above-described treatment methods featuring therapy with an effective amount of a subject synthetic Type I interferon receptor polypeptide agonist, a hyperglycosylated polypeptide variant, a protease-resistant polypeptide variant, or a hyperglycosylated, protease-resistant polypeptide variant for the treatment of viral infection (e.g., HCV infection) in a patient can be modified to include co-administration to the patient of an amount of IFN-γ and an amount of a nucleoside analog effective to augment the anti-viral effect of the synthetic Type I interferon receptor polypeptide agonist therapy, for the desired treatment duration.

[0809] As non-limiting examples, any of the above-described treatment methods featuring therapy with an effective amount of a subject synthetic Type I interferon receptor polypeptide agonist, a hyperglycosylated polypeptide variant, a protease-resistant polypeptide variant, or a hyperglycosylated, protease-resistant polypeptide variant for the treatment of viral infection (e.g., HCV infection) in a patient can be modified to include co-administration to the patient of an amount of IFN-γ and an amount of ribavirin effective to augment the anti-viral effect of the synthetic Type I interferon receptor polypeptide agonist therapy, for the desired treatment duration.

[0810] As non-limiting examples, any of the above-described treatment methods featuring therapy with an effective amount of a subject synthetic Type I interferon receptor polypeptide agonist, a hyperglycosylated polypeptide variant, a protease-resistant polypeptide variant, or a hyperglycosylated, protease-resistant polypeptide variant for the treatment of viral infection (e.g., HCV infection) in a patient can be modified to include co-administration to the patient of an amount of IFN-γ and an amount of an L-nucleoside (e.g., levovirin) effective to augment the anti-viral effect of the synthetic Type I interferon receptor polypeptide agonist therapy, for the desired treatment duration.

[0811] As non-limiting examples, any of the above-described treatment methods featuring therapy with an effective amount of a subject synthetic Type I interferon receptor polypeptide agonist, a hyperglycosylated polypeptide variant, a protease-resistant polypeptide variant, or a hyperglycosylated, protease-resistant polypeptide variant for the treatment of viral infection (e.g., HCV infection) in a patient can be modified to include co-administration to the patient of an amount of IFN-γ and an amount of viramidine effective to augment the anti-viral effect of the synthetic Type I interferon receptor polypeptide agonist therapy, for the desired treatment duration.

[0812] As non-limiting examples, any of the above-described treatment methods featuring therapy with an effective amount of a subject synthetic Type I interferon receptor polypeptide agonist, a hyperglycosylated polypeptide variant, a protease-resistant polypeptide variant, or a hyperglycosylated, protease-resistant polypeptide variant for the treatment of viral infection (e.g., HCV infection) in a patient can be modified to include co-administration to the patient of an amount of IFN-γ and an amount of a TNF antagonist (e.g., etanercept, infliximab, or adalimumab) effective to augment the anti-viral effect of the synthetic Type I interferon receptor polypeptide agonist therapy, for the desired treatment duration.

[0813] As non-limiting examples, any of the above-described treatment methods featuring therapy with an effective amount of a subject synthetic Type I interferon receptor polypeptide agonist, a hyperglycosylated polypeptide variant, a protease-resistant polypeptide variant, or a hyperglycosylated, protease-resistant polypeptide variant for the treatment of viral infection (e.g., HCV infection) in a patient can be modified to include co-administration to the patient of an amount of IFN-γ and an amount of thymosin-α effective to augment the anti-viral effect of the synthetic Type I interferon receptor polypeptide agonist therapy, for the desired treatment duration.

[0814] As non-limiting examples, any of the above-described treatment methods featuring therapy with an effective amount of a subject synthetic Type I interferon receptor polypeptide agonist, a hyperglycosylated polypeptide variant, a protease-resistant polypeptide variant, or a hyperglycosylated, protease-resistant polypeptide variant for the treatment of an HCV infection in a patient can be modified to include co-administration to the patient of an amount of IFN-γ and an amount of an NS3 inhibitor effective to augment the anti-viral effect of the synthetic Type I interferon receptor polypeptide agonist therapy, for the desired treatment duration.

[0815] As non-limiting examples, any of the above-described treatment methods featuring therapy with an effective amount of a subject synthetic Type I interferon receptor polypeptide agonist, a hyperglycosylated polypeptide variant, a protease-resistant polypeptide variant, or a hyperglycosylated, protease-resistant polypeptide variant for the treatment of an HCV infection in a patient can be modified to include co-administration to the patient of an amount of IFN-γ and an amount of an NS5B inhibitor effective to augment the anti-viral effect of the synthetic Type I interferon receptor polypeptide agonist therapy, for the desired treatment duration.

[0816] As non-limiting examples, any of the above-described treatment methods featuring therapy with an effective amount of a subject synthetic Type I interferon receptor polypeptide agonist, a hyperglycosylated polypeptide variant, a protease-resistant polypeptide variant, or a hyperglycosylated, protease-resistant polypeptide variant for the treatment of an HCV infection in a patient can be modified to include co-administration to the patient of an amount of IFN-γ and an amount of an alpha-glucosidase inhibitor effective to augment the anti-viral effect of the synthetic Type I interferon receptor polypeptide agonist therapy, for the desired treatment duration.

[0817] As non-limiting examples, any of the above-described treatment methods featuring therapy with an effective amount of a subject synthetic Type I interferon receptor polypeptide agonist, a hyperglycosylated polypeptide variant, a protease-resistant polypeptide variant, or a hyperglycosylated, protease-resistant polypeptide variant for the treatment of viral infection (e.g., HCV infection) in a patient can be modified to include co-administration to the patient of an amount of a nucleoside analog (e.g., ribavirin, viramidine, or an L-nucleoside such as levovirin) and an amount of IFN-γ effective to augment the anti-viral effect of the synthetic Type I interferon receptor polypeptide agonist therapy, for the desired treatment duration.

[0818] As non-limiting examples, any of the above-described treatment methods featuring therapy with an effective amount of a subject synthetic Type I interferon receptor polypeptide agonist, a hyperglycosylated polypeptide variant, a protease-resistant polypeptide variant, or a hyperglycosylated, protease-resistant polypeptide variant for the treatment of viral infection (e.g., HCV infection) in a patient can be modified to include co-administration to the patient of an amount of a nucleoside analog (e.g., ribavirin, viramidine, or an L-nucleoside such as levovirin) and an amount of TNF antagonist (e.g., etanercept, infliximab, or adalimumab) effective to augment the anti-viral effect of the synthetic Type I interferon receptor polypeptide agonist therapy, for the desired treatment duration.

[0819] As non-limiting examples, any of the above-described treatment methods featuring therapy with an effective amount of a subject synthetic Type I interferon receptor polypeptide agonist, a hyperglycosylated polypeptide variant, a protease-resistant polypeptide variant, or a hyperglycosylated, protease-resistant polypeptide variant for the treatment of viral infection (e.g., HCV infection) in a patient can be modified to include co-administration to the patient of an amount of a nucleoside analog (e.g., ribavirin, viramidine, or an L-nucleoside such as levovirin) and an amount of thymosin-α effective to augment the anti-viral effect of the synthetic Type I interferon receptor polypeptide agonist therapy, for the desired treatment duration.

[0820] As non-limiting examples, any of the above-described treatment methods featuring therapy with an effective amount of a subject synthetic Type I interferon receptor polypeptide agonist, a hyperglycosylated polypeptide variant, a protease-resistant polypeptide variant, or a hyperglycosylated, protease-resistant polypeptide variant for the treatment of viral infection (e.g., HCV infection) in a patient can be modified to include co-administration to the patient of an amount of a nucleoside analog (e.g., ribavirin, viramidine, or an L-nucleoside such as levovirin) and an amount of a SAPK inhibitor (e.g., pirfenidone or a pirfenidone analog) effective to augment the anti-viral effect of the synthetic Type I interferon receptor polypeptide agonist therapy, for the desired treatment duration.

[0821] As non-limiting examples, any of the above-described treatment methods featuring therapy with an effective amount of a subject synthetic Type I interferon receptor polypeptide agonist, a hyperglycosylated polypeptide variant, a protease-resistant polypeptide variant, or a hyperglycosylated, protease-resistant polypeptide variant for the treatment of an HCV infection in a patient can be modified to include co-administration to the patient of an amount of a nucleoside analog (e.g., ribavirin, viramidine, or an L-nucleoside such as levovirin) and an amount of an NS3 inhibitor effective to augment the anti-viral effect of the synthetic Type I interferon receptor polypeptide agonist therapy, for the desired treatment duration.

[0822] As non-limiting examples, any of the above-described treatment methods featuring therapy with an effective amount of a subject synthetic Type I interferon receptor polypeptide agonist, a hyperglycosylated polypeptide variant, a protease-resistant polypeptide variant, or a hyperglycosylated, protease-resistant polypeptide variant for the treatment of an HCV infection in a patient can be modified to include co-administration to the patient of an amount of a nucleoside analog (e.g., ribavirin, viramidine, or an L-nucleoside such as levovirin) and an amount of an NS5B inhibitor effective to augment the anti-viral effect of the synthetic Type I interferon receptor polypeptide agonist therapy, for the desired treatment duration.

[0823] As non-limiting examples, any of the above-described treatment methods featuring therapy with an effective amount of a subject synthetic Type I interferon receptor polypeptide agonist, a hyperglycosylated polypeptide variant, a protease-resistant polypeptide variant, or a hyperglycosylated, protease-resistant polypeptide variant for the treatment of an HCV infection in a patient can be modified to include co-administration to the patient of an amount of a nucleoside analog (e.g., ribavirin, viramidine, or an L-nucleoside such as levovirin) and an amount of a TNF antagonist (e.g., etanercept, infliximab, or adalimumab) effective to augment the anti-viral effect of the synthetic Type I interferon receptor polypeptide agonist therapy, for the desired treatment duration.

[0824] As non-limiting examples, any of the above-described treatment methods featuring therapy with an effective amount of a subject synthetic Type I interferon receptor polypeptide agonist, a hyperglycosylated polypeptide variant, a protease-resistant polypeptide variant, or a hyperglycosylated, protease-resistant polypeptide variant for the treatment of an HCV infection in a patient can be modified to include co-administration to the patient of an amount of an NS3 inhibitor and an amount of a TNF antagonist (e.g., etanercept, infliximab, or adalimumab) effective to augment the anti-viral effect of the synthetic Type I interferon receptor polypeptide agonist therapy, for the desired treatment duration.

[0825] As non-limiting examples, any of the above-described treatment methods featuring therapy with an effective amount of a subject synthetic Type I interferon receptor polypeptide agonist, a hyperglycosylated polypeptide variant, a protease-resistant polypeptide variant, or a hyperglycosylated, protease-resistant polypeptide variant for the treatment of an HCV infection in a patient can be modified to include co-administration to the patient of an amount of an NS5B inhibitor and an amount of a TNF antagonist (e.g., etanercept, infliximab, or adalimumab) effective to augment the anti-viral effect of the synthetic Type I interferon receptor polypeptide agonist therapy, for the desired treatment duration.

[0826] As non-limiting examples, any of the above-described treatment methods featuring therapy with an effective amount of a subject synthetic Type I interferon receptor polypeptide agonist, a hyperglycosylated polypeptide variant, a protease-resistant polypeptide variant, or a hyperglycosylated, protease-resistant polypeptide variant for the treatment of an HCV infection in a patient can be modified to include co-administration to the patient of an amount of an alpha-glucosidase inhibitor and an amount of a TNF antagonist (e.g., etanercept, infliximab, or adalimumab) effective to augment the anti-viral effect of the synthetic Type I interferon receptor polypeptide agonist therapy, for the desired treatment duration.

[0827] As non-limiting examples, any of the above-described treatment methods featuring therapy with an effective amount of a subject synthetic Type I interferon receptor polypeptide agonist, a hyperglycosylated polypeptide variant, a protease-resistant polypeptide variant, or a hyperglycosylated, protease-resistant polypeptide variant for the treatment of an HCV infection in a patient can be modified to include co-administration to the patient of an amount of a SAPK inhibitor (e.g., pirfenidone or a pirfendione analog) and an amount of a TNF antagonist (e.g., etanercept, infliximab, or adalimumab) effective to augment the anti-viral effect of the synthetic Type I interferon receptor polypeptide agonist therapy, for the desired treatment duration.

[0828] As non-limiting examples, any of the above-described treatment methods featuring therapy with an effective amount of a subject synthetic Type I interferon receptor polypeptide agonist, a hyperglycosylated polypeptide variant, a protease-resistant polypeptide variant, or a hyperglycosylated, protease-resistant polypeptide variant for the treatment of an HCV infection in a patient can be modified to include co-administration to the patient of an amount of thymosin-α and an amount of a TNF antagonist (e.g., etanercept, infliximab, or adalimumab) effective to augment the anti-viral effect of the synthetic Type I interferon receptor polypeptide agonist therapy, for the desired treatment duration.

[0829] As non-limiting examples, any of the above-described treatment methods featuring therapy with an effective amount of a subject synthetic Type I interferon receptor polypeptide agonist, a hyperglycosylated polypeptide variant, a protease-resistant polypeptide variant, or a hyperglycosylated, protease-resistant polypeptide variant for the treatment of an HCV infection in a patient can be modified to include co-administration to the patient of an amount of a nucleoside analog (e.g., ribavirin, viramidine, or an L-nucleoside such as levovirin) and an amount of thymosin-α effective to augment the anti-viral effect of the synthetic Type I interferon receptor polypeptide agonist therapy, for the desired treatment duration.

[0830] As non-limiting examples, any of the above-described treatment methods featuring therapy with an effective amount of a subject synthetic Type I interferon receptor polypeptide agonist, a hyperglycosylated polypeptide variant, a protease-resistant polypeptide variant, or a hyperglycosylated, protease-resistant polypeptide variant for the treatment of an HCV infection in a patient can be modified to include co-administration to the patient of an amount of a SAPK inhibitor (e.g., pirfenidone or a pirfenidone analog) and an amount of thymosin-α effective to augment the anti-viral effect of the synthetic Type I interferon receptor polypeptide agonist therapy, for the desired treatment duration.

[0831] As non-limiting examples, any of the above-described treatment methods featuring therapy with an effective amount of a subject synthetic Type I interferon receptor polypeptide agonist, a hyperglycosylated polypeptide variant, a protease-resistant polypeptide variant, or a hyperglycosylated, protease-resistant polypeptide variant for the treatment of an HCV infection in a patient can be modified to include co-administration to the patient of an amount of an NS3 inhibitor and an amount of thymosin-α effective to augment the anti-viral effect of the synthetic Type I interferon receptor polypeptide agonist therapy, for the desired treatment duration.

[0832] As non-limiting examples, any of the above-described treatment methods featuring therapy with an effective amount of a subject synthetic Type I interferon receptor polypeptide agonist, a hyperglycosylated polypeptide variant, a protease-resistant polypeptide variant, or a hyperglycosylated, protease-resistant polypeptide variant for the treatment of an HCV infection in a patient can be modified to include co-administration to the patient of an amount of an NS5B inhibitor and an amount of thymosin-α effective to augment the anti-viral effect of the synthetic Type I interferon receptor polypeptide agonist therapy, for the desired treatment duration.

[0833] As non-limiting examples, any of the above-described treatment methods featuring therapy with an effective amount of a subject synthetic Type I interferon receptor polypeptide agonist, a hyperglycosylated polypeptide variant, a protease-resistant polypeptide variant, or a hyperglycosylated, protease-resistant polypeptide variant for the treatment of an HCV infection in a patient can be modified to include co-administration to the patient of an amount of an alpha-glucosidase inhibitor and an amount of thymosin-α effective to augment the anti-viral effect of the synthetic Type I interferon receptor polypeptide agonist therapy, for the desired treatment duration.

[0834] As non-limiting examples, any of the above-described treatment methods featuring therapy with an effective amount of a subject synthetic Type I interferon receptor polypeptide agonist, a hyperglycosylated polypeptide variant, a protease-resistant polypeptide variant, or a hyperglycosylated, protease-resistant polypeptide variant for the treatment of an HCV infection in a patient can be modified to include co-administration to the patient of an amount of a nucleoside analog (e.g., ribavirin, viramidine, or an L-nucleoside such as levovirin) and an amount of a SAPK inhibitor (e.g., pirfenidone or a pirfenidone analog) effective to augment the anti-viral effect of the synthetic Type I interferon receptor polypeptide agonist therapy, for the desired treatment duration.

[0835] As non-limiting examples, any of the above-described treatment methods featuring therapy with an effective amount of a subject synthetic Type I interferon receptor polypeptide agonist, a hyperglycosylated polypeptide variant, a protease-resistant polypeptide variant, or a hyperglycosylated, protease-resistant polypeptide variant for the treatment of an HCV infection in a patient can be modified to include co-administration to the patient of an amount of an NS3 inhibitor and an amount of a SAPK inhibitor (e.g., pirfenidone or a pirfenidone analog) effective to augment the anti-viral effect of the synthetic Type I interferon receptor polypeptide agonist therapy, for the desired treatment duration.

[0836] As non-limiting examples, any of the above-described treatment methods featuring therapy with an effective amount of a subject synthetic Type I interferon receptor polypeptide agonist, a hyperglycosylated polypeptide variant, a protease-resistant polypeptide variant, or a hyperglycosylated, protease-resistant polypeptide variant for the treatment of an HCV infection in a patient can be modified to include co-administration to the patient of an amount of an NS5B inhibitor and an amount of a SAPK inhibitor (e.g., pirfenidone or a pirfenidone analog) effective to augment the anti-viral effect of the synthetic Type I interferon receptor polypeptide agonist therapy, for the desired treatment duration.

[0837] As non-limiting examples, any of the above-described treatment methods featuring therapy with an effective amount of a subject synthetic Type I interferon receptor polypeptide agonist, a hyperglycosylated polypeptide variant, a protease-resistant polypeptide variant, or a hyperglycosylated, protease-resistant polypeptide variant for the treatment of an HCV infection in a patient can be modified to include co-administration to the patient of an amount of an alpha-glucosidase inhibitor and an amount of a SAPK inhibitor (e.g., pirfenidone or a pirfenidone analog) effective to augment the anti-viral effect of the synthetic Type I interferon receptor polypeptide agonist therapy, for the desired treatment duration.

[0838] As non-limiting examples, any of the above-described treatment methods featuring therapy with an effective amount of a subject synthetic Type I interferon receptor polypeptide agonist, a hyperglycosylated polypeptide variant, a protease-resistant polypeptide variant, or a hyperglycosylated, protease-resistant polypeptide variant for the treatment of an HCV infection in a patient can be modified to include co-administration to the patient of an amount of a nucleoside analog (e.g., ribavirin, viramidine, or an L-nucleoside such as levovirin) and an amount of an alpha-glucosidase inhibitor effective to augment the anti-viral effect of the synthetic Type I interferon receptor polypeptide agonist therapy, for the desired treatment duration.

[0839] As non-limiting examples, any of the above-described treatment methods featuring therapy with an effective amount of a subject synthetic Type I interferon receptor polypeptide agonist, a hyperglycosylated polypeptide variant, a protease-resistant polypeptide variant, or a hyperglycosylated, protease-resistant polypeptide variant for the treatment of an HCV infection in a patient can be modified to include co-administration to the patient of an amount of an NS5B inhibitor and an amount of an NS3 inhibitor effective to augment the anti-viral effect of the synthetic Type I interferon receptor polypeptide agonist therapy, for the desired treatment duration.

[0840] As non-limiting examples, any of the above-described treatment methods featuring therapy with an effective amount of a subject synthetic Type I interferon receptor polypeptide agonist, a hyperglycosylated polypeptide variant, a protease-resistant polypeptide variant, or a hyperglycosylated, protease-resistant polypeptide variant for the treatment of an HCV infection in a patient can be modified to include co-administration to the patient of an amount of an alpha-glucosidase inhibitor and an amount of an NS3 inhibitor effective to augment the anti-viral effect of the synthetic Type I interferon receptor polypeptide agonist therapy, for the desired treatment duration.

[0841] As non-limiting examples, any of the above-described treatment methods featuring therapy with an effective amount of a subject synthetic Type I interferon receptor polypeptide agonist for the treatment of an HCV infection in a patient can be modified to include co-administration to the patient of an amount of an NS5B inhibitor and an amount of an alpha-glucosidase inhibitor effective to augment the anti-viral effect of the synthetic Type I interferon receptor polypeptide agonist therapy, for the desired treatment duration.

Patient Identification

[0842] In certain embodiments, the specific regimen of drug therapy used in treatment of the HCV patient is selected according to certain disease parameters exhibited by the patient, such as the initial viral load, genotype of the HCV infection in the patient, liver histology and/or stage of liver fibrosis in the patient.

[0843] Thus, in some embodiments, the present invention provides any of the above-described methods for the treatment of HCV infection in which the subject method is modified to treat a treatment failure patient for a duration of 48 weeks.

[0844] In other embodiments, the invention provides any of the above-described methods for HCV in which the subject method is modified to treat a non-responder patient, where the patient receives a 48 week course of therapy.

[0845] In other embodiments, the invention provides any of the above-described methods for the treatment of HCV infection in which the subject method is modified to treat a relapser patient, where the patient receives a 48 week course of therapy.

[0846] In other embodiments, the invention provides any of the above-described methods for the treatment of HCV infection in which the subject method is modified to treat a naïve patient infected with HCV genotype 1, where the patient receives a 48 week course of therapy.

[0847] In other embodiments, the invention provides any of the above-described methods for the treatment of HCV infection in which the subject method is modified to treat a naïve patient infected with HCV genotype 4, where the patient receives a 48 week course of therapy.

[0848] In other embodiments, the invention provides any of the above-described methods for the treatment of HCV infection in which the subject method is modified to treat a naïve patient infected with HCV genotype 1, where the patient has a high viral load (HVL), where “HVL” refers to an HCV viral load of greater than 2x1⁰⁶ HCV genome copies per mL serum, and where the patient receives a 48 week course of therapy.

[0849] In one embodiment, the invention provides any of the above-described methods for the treatment of an HCV infection, where the subject method is modified to include the steps of (1) identifying a patient having advanced or severe stage liver fibrosis as measured by a Knodell score of 3 or 4 and then (2) administering to the patient the drug therapy of the subject method for a time period of about 24 weeks to about 60 weeks, or about 30 weeks to about one year, or about 36 weeks to about 50 weeks, or about 40 weeks to about 48 weeks, or at least about 24 weeks, or at least about 30 weeks, or at least about 36 weeks, or at least about 40 weeks, or at least about 48 weeks, or at least about 60 weeks.

[0850] In another embodiment, the invention provides any of the above-described methods for the treatment of an HCV infection, where the subject method is modified to include the steps of (1) identifying a patient having advanced or severe stage liver fibrosis as measured by a Knodell score of 3 or 4 and then (2) administering to the patient the drug therapy of the subject method for a time period of about 40 weeks to about 50 weeks, or about 48 weeks.

[0851] In another embodiment, the invention provides any of the above-described methods for the treatment of an HCV infection, where the subject method is modified to include the steps of (1) identifying a patient having an HCV genotype 1 infection and an initial viral load of greater than 2 million viral genome copies per ml of patient serum and then (2) administering to the patient the drug therapy of the subject method for a time period of about 24 weeks to about 60 weeks, or about 30 weeks to about one year, or about 36 weeks to about 50 weeks, or about 40 weeks to about 48 weeks, or at least about 24 weeks, or at least about 30 weeks, or at least about 36 weeks, or at least about 40 weeks, or at least about 48 weeks, or at least about 60 weeks.

[0852] In another embodiment, the invention provides any of the above-described methods for the treatment of an HCV infection, where the subject method is modified to include the steps of (1) identifying a patient having an HCV genotype 1 infection and an initial viral load of greater than 2 million viral genome copies per ml of patient serum and then (2) administering to the patient the drug therapy of the subject method for a time period of about 40 weeks to about 50 weeks, or about 48 weeks.

[0853] In another embodiment, the invention provides any of the above-described methods for the treatment of an HCV infection, where the subject method is modified to include the steps of (1) identifying a patient having an HCV genotype 1 infection and an initial viral load of greater than 2 million viral genome copies per ml of patient serum and no or early stage liver fibrosis as measured by a Knodell score of 0, 1, or 2 and then (2) administering to the patient the drug therapy of the subject method for a time period of about 24 weeks to about 60 weeks, or about 30 weeks to about one year, or about 36 weeks to about 50 weeks, or about 40 weeks to about 48 weeks, or at least about 24 weeks, or at least about 30 weeks, or at least about 36 weeks, or at least about 40 weeks, or at least about 48 weeks, or at least about 60 weeks.

[0854] In another embodiment, the invention provides any of the above-described methods for the treatment of an HCV infection, where the subject method is modified to include the steps of (1) identifying a patient having an HCV genotype 1 infection and an initial viral load of greater than 2 million viral genome copies per ml of patient serum and no or early stage liver fibrosis as measured by a Knodell score of 0, 1, or 2 and then (2) administering to the patient the drug therapy of the subject method for a time period of about 40 weeks to about 50 weeks, or about 48 weeks.

[0855] In another embodiment, the invention provides any of the above-described methods for the treatment of an HCV infection, where the subject method is modified to include the steps of (1) identifying a patient having an HCV genotype 1 infection and an initial viral load of less than or equal to 2 million viral genome copies per ml of patient serum and then (2) administering to the patient the drug therapy of the subject method for a time period of about 20 weeks to about 50 weeks, or about 24 weeks to about 48 weeks, or about 30 weeks to about 40 weeks, or up to about 20 weeks, or up to about 24 weeks, or up to about 30 weeks, or up to about 36 weeks, or up to about 48 weeks.

[0856] In another embodiment, the invention provides any of the above-described methods for the treatment of an HCV infection, where the subject method is modified to include the steps of (1) identifying a patient having an HCV genotype 1 infection and an initial viral load of less than or equal to 2 million viral genome copies per ml of patient serum and then (2) administering to the patient the drug therapy of the subject method for a time period of about 20 weeks to about 24 weeks.

[0857] In another embodiment, the invention provides any of the above-described methods for the treatment of an HCV infection, where the subject method is modified to include the steps of (1) identifying a patient having an HCV genotype 1 infection and an initial viral load of less than or equal to 2 million viral genome copies per ml of patient serum and then (2) administering to the patient the drug therapy of the subject method for a time period of about 24 weeks to about 48 weeks.

[0858] In another embodiment, the invention provides any of the above-described methods for the treatment of an HCV infection, where the subject method is modified to include the steps of (1) identifying a patient having an HCV genotype 2 or 3 infection and then (2) administering to the patient the drug therapy of the subject method for a time period of about 24 weeks to about 60 weeks, or about 30 weeks to about one year, or about 36 weeks to about 50 weeks, or about 40 weeks to about 48 weeks, or at least about 24 weeks, or at least about 30 weeks, or at least about 36 weeks, or at least about 40 weeks, or at least about 48 weeks, or at least about 60 weeks.

[0859] In another embodiment, the invention provides any of the above-described methods for the treatment of an HCV infection, where the subject method is modified to include the steps of (1) identifying a patient having an HCV genotype 2 or 3 infection and then (2) administering to the patient the drug therapy of the subject method for a time period of about 20 weeks to about 50 weeks, or about 24 weeks to about 48 weeks, or about 30 weeks to about 40 weeks, or up to about 20 weeks, or up to about 24 weeks, or up to about 30 weeks, or up to about 36 weeks, or up to about 48 weeks.

[0860] In another embodiment, the invention provides any of the above-described methods for the treatment of an HCV infection, where the subject method is modified to include the steps of (1) identifying a patient having an HCV genotype 2 or 3 infection and then (2) administering to the patient the drug therapy of the subject method for a time period of about 20 weeks to about 24 weeks.

[0861] In another embodiment, the invention provides any of the above-described methods for the treatment of an HCV infection, where the subject method is modified to include the steps of (1) identifying a patient having an HCV genotype 2 or 3 infection and then (2) administering to the patient the drug therapy of the subject method for a time period of at least about 24 weeks.

[0862] In another embodiment, the invention provides any of the above-described methods for the treatment of an HCV infection, where the subject method is modified to include the steps of (1) identifying a patient having an HCV genotype 1 or 4 infection and then (2) administering to the patient the drug therapy of the subject method for a time period of about 24 weeks to about 60 weeks, or about 30 weeks to about one year, or about 36 weeks to about 50 weeks, or about 40 weeks to about 48 weeks, or at least about 24 weeks, or at least about 30 weeks, or at least about 36 weeks, or at least about 40 weeks, or at least about 48 weeks, or at least about 60 weeks.

[0863] In another embodiment, the invention provides any of the above-described methods for the treatment of an HCV infection, where the subject method is modified to include the steps of (1) identifying a patient having an HCV infection characterized by any of HCV genotypes 5, 6, 7, 8 and 9 and then (2) administering to the patient the drug therapy of the subject method for a time period of about 20 weeks to about 50 weeks.

[0864] In another embodiment, the invention provides any of the above-described methods for the treatment of an HCV infection, where the subject method is modified to include the steps of (1) identifying a patient having an HCV infection characterized by any of HCV genotypes 5, 6, 7, 8 and 9 and then (2) administering to the patient the drug therapy of the subject method for a time period of at least about 24 weeks and up to about 48 weeks.

Type II Interferon Receptor Agonists

[0865] As used herein, the term “Type II interferon receptor agonist” includes any naturally occurring or non-naturally-occurring ligand of a human Type II interferon receptor that binds to and causes signal transduction via the receptor. Type II interferon receptor agonists include interferons, including naturally-occurring interferons, modified interferons, synthetic interferons, pegylated interferons, fusion proteins comprising an interferon and a heterologous protein, shuffled interferons; antibody specific for an interferon receptor; non-peptide chemical agonists; and the like.

[0866] A specific example of a Type II interferon receptor agonist is IFN-gamma and variants thereof. While the present invention exemplifies use of an IFN-gamma polypeptide, it will be readily apparent that any Type II interferon receptor agonist can be used in a subject method.

SAPK Inhibitors

[0867] SAPK inhibitors suitable for use in a subject treatment method specifically include pirfenidone and pirfenidone analogs; and also specifically include any compound of Formula I as set forth in U.S. Patent Publication No. 20030149041.

[0868] Additional SAPK inhibitors suitable for use herein include agents that inhibit enzymatic activity of a SAPK by at least about 10%, at least about 20%, at least about 25%, at least about 30%, at least about 35%, at least about 40%, at least about 50%, at least about 60%, at least about 70%, at least about 80%, or at least about 90%, or more, when compared with the enzymatic activity of the SAPK in the absence of the SAPK inhibitor.

[0869] The signal transduction pathways that use mitogen-activated protein kinases (MAPK) have an important role in a variety of cellular responses, including growth, stress-induced gene expression, and compensation for alterations in the environment. The SAPK group of MAPKs includes the c-Jun N-terminal Kinase (JNK) and p38 kinases. The p38 group of MAPK include at least four members, designated p38 or p38α, p38β, p38γ, and p38δ. The amino acid sequences of p38α, p38β, and p38γ from various species are known. For example, the amino acid sequences of human p38α, p38β, and p38γ are found under the following GenBank Accession Nos.: 1) Q16539, NP_{—}620583, and NP_{—}001306 provide amino acid sequences of human p38α polypeptides; 2) NP_{—}620478, NP_{—}002742, and Q15759 provide amino acid sequences of human p38β polypeptides; and 3) NP_{—}002960, P53778, and JC5252 provide amino acid sequences of human p38γ polypeptides.

[0870] In some embodiments, a suitable SAPK inhibitor is an agent that inhibits enzymatic activity of p38α, p38β, and p38γ. In other embodiments, a suitable SAPK inhibitor is an agent that preferentially inhibits the enzymatic activity of p38α and p38β, i.e., the agent is a stronger inhibitor of the enzymatic activity of p38α and p38β than that of p38γ, e.g., the agent's IC50 against p38α and p38β is at least about two-fold lower, or about five-fold lower, or about ten-fold lower, or more, below the agent's IC50 against p38γ.

[0871] In other embodiments, a suitable SAPK inhibitor is an agent that preferentially inhibits p38γ, i.e., the agent is a stronger inhibitor of the enzymatic activity of p38γ than that of p38α and p38β, e.g., the agent's IC50 against p38γ is at least about two-fold lower, or about five-fold lower, or about ten-fold lower, or more, below the agent's IC50 against p38α and p38β.

[0872] In some embodiments, a SAPK inhibitor is a competitive inhibitor of a SAPK, e.g., a p38α, a p38β, or a p38γ. In some of these embodiments, a SAPK inhibitor is one that competes for adenosine triphosphate (ATP) for binding to the ATP binding site of p38α, p38β, or p38γ.

[0873] In addition, stress-activated protein kinase (SAPK) inhibitors that are suitable for use in a subject combination therapy include any 2-alkyl imidazole as disclosed in U.S. Pat. No. 6,548,520; any of the 1,4,5-substituted imidazole compounds disclosed in U.S. Pat. No. 6,489,325; 1,4,5-substituted imidazole compounds disclosed in U.S. Pat. No. 6,569,871; heteroaryl aminophenyl ketone compounds disclosed in Published U.S. Patent Application No. 2003/0073832; pyridyl imidazole compounds disclosed in U.S. Pat. No. 6,288,089; and heteroaryl aminobenzophenones disclosed in U.S. Pat. No. 6,432,962. Also suitable for use are compounds disclosed in U.S. Pat. No. 6,214,854. Also suitable for use are the heterocyclic compounds discussed in WO 99/61426.

[0874] Pirfenidone and pirfenidone analogs, which are specifically included, are described in detail below. As discussed above, compounds of Formula I of U.S. Patent Publication No. 20030149041 are specifically included. Formula I is as follows:

[chemical structure]

[0875] wherein: R¹ is chosen from —H, C₁ to C₂₀ hydrocarbon, aminocarbonylalkyl, alkoxyalkyl, substituted arylalkyl, heteroaryl, heteroarylalkyl, heterocyclylalkyl, and substituted heterocyclylalkyl;

[0876] R² is chosen from halogen, C₁ to C₂₀ hydrocarbon, hydroxy, heteroaryl, substituted heteroaryl, heterocyclyl, substituted heterocyclyl;

[0877] R⁵ is chosen from —H, alkyl and substituted alkyl;

[0878] R⁶ is chosen from a direct bond, alkyl, aryl, substituted aryl and heteroaryl;

[0879] R⁷ is chosen from —H, acyl, alkyl, substituted alkyl, alkoxycarbonyl, amidine, aryl, arylalkyl, heterocyclyl, heteroaryl, substituted heteroaryl, substituted aryloxy, heteroarylsulfonamido, dialkylsulfonamido,

[chemical structure]

[0880] —C(O)NR⁸R⁹, —C(NH)NR⁸R⁹ and —NR⁸R⁹;

[0881] R⁸ is chosen from —H and alkyl;

[0882] R⁹ is chosen from —H, alkyl, substituted alkyl, aryl, heteroaryl, alkylcarbonyl and arylcarbonyl;

[0883] R³ is chosen from a direct bond,

[chemical structure]

[0884] wherein the left hand bond is the point of attachment to the ring and the right band bond is the point of attachment to R⁴;

[0885] R⁴ is chosen from —H, halogen, alkyl, heterocyclyl, alkylamino, aminocarbonyl,

[chemical structure]

[0886] —C(S)NHR¹², —CHR¹³R¹⁴, —C(O)NHR¹⁵, —C(O)(CH₂)₀₋₂R¹⁶, —S(O₂)R¹⁷, —OR¹⁸

[chemical structure]

[0887] wherein R¹⁰ is chosen from —H, —OH, alkyl, cycloalkyl and substituted cycloalkyl; R¹¹ is chosen from —H, —OH, —COOH, aryl, substituted aryl, heteroaryl, substituted heteroaryl, aryl substituted alkyl, cycloalkyl, substituted cycloalkyl, alkoxy, aminocarbonyl, aminocarbonylalkyl,

[chemical structure]

[0888] R¹² is chosen from alkyl and aryl; R¹³ is chosen from —H and aryl; R¹⁴ is chosen from aryl, substituted aryl, heteroaryl, substituted alkyl, aryl substituted alkyl and alkoxy substituted alkyl; R¹⁵ is chosen from alkyl, aryl, substituted aryl and substituted alkyl; R¹⁶ is chosen from aryl, substituted aryl, heteroaryl, carboxyl, alkoxy, substituted alkyl, cycloalkyl, substituted cycloalkyl, aminocarbonyl, substituted aminocarbonyl, heterocyclyl and

[chemical structure]

[0889] R¹⁷ is chosen from alkyl and dialkylamino; R¹⁸ is chosen from C₁ to C₂₀ hydrocarbon, substituted C₁ to C₂₀ hydrocarbon and heteroaryl; Y is chosen from —H and lower alkyl, or Y and R¹ taken together with the attached N, may be chosen from heterocyclyl, substituted heterocyclyl, heteroaryl and substituted heteroaryl; wherein at least two of X, X¹ and X² are —N═, and the other is chosen from —C(H)═ and —N═.

[0890] Of particular interest in some embodiments is use of any of the following SAPK inhibitor compounds, or pharmaceutically acceptable salts, or derivatives, or esters, or analogs, thereof:

[chemical structure]

[0891] which compound has the IUPAC designation (4-benzyl-piperidin-1-yl)-(1H-indol-5-yl)-methanone. Also suitable for use are any of the following compounds: (4-benzyl-piperidin-1-yl)-(6-chloro-1H-indol-5-yl)-methanone; (4-chloro-1H-indol-5-yl)-[4-(4-fluoro-benzyl)-piperidin-1-yl]-methanone; (4-benzyl-piperidin-1-yl)-(4-methoxy-1H-inol-5-yl)-methanone; (4-Benzyl-piperidin-1-yl)-{1-[3-(cyclohexylmethyl-amino)-2-hydroxy-propyl]-1H-indol-5-yl}-methanone; (4-Benzyl-piperidin-1-yl)-{1-[2-hydroxy-3-(4-methyl-piperazin-1-yl)-propyl]-1H-indol-5-yl}-methanone; [1-(3-Benzylamino-2-hydroxy-propyl)-1H-indol-5-yl]-(4-benzyl-piperidin-1-yl)-methanone; (4-Benzyl-piperidin-1-yl)-{1-[2-hydroxy-3-(4-methoxy-benzylamino)-propyl]-1H-indol-5-yl}-methanone; (4-Benzyl-piperidin-1-yl)-[1-(2-hydroxy-3-propylamino-propyl)-1H-indol-5-yl]-methanone; (4-Benzyl-piperidin-1-yl)-[1-(pyridine-4-carbonyl)-1H-indol-5-yl]-methanone; 1-[5-(4-Benzyl-piperidine-1-carbonyl)-indol-1-yl]-ethanone; 2-[5-(4-Benzyl-piperidine-1-carbonyl)-indol-1-yl]-N-(4-methoxy-benzyl)-acetamide; 5-(4-Benzyl-piperidine-1-carbonyl)-1H-indole-3-carboxylic acid (2-methoxy-ethyl)-amide; 5-(4-Benzyl-piperidine-1-carbonyl)-1H-indole-3-carboxylic acid (2-methylamino-ethyl)-amide; 5-(4-Benzyl-piperidine-1-carbonyl)-1H-indole-3-carboxylic acid (2-amino-ethyl)-amide; [3-(4-Benzyl-piperidine-1-carbonyl)-1H-indol-5-yl]-(4-benzyl-piperidin-1-yl)-methanone; [3-(4-Benzyl-piperidine-1-carbonyl)-1H-indol-6-yl]-(4-benzyl-piperidin-1-yl)-methanone; 5-(4-Benzyl-piperidine-1-carbonyl)-1H-indole-3-carboxylic acid 4-fluoro-benzylamide; 5-(4-Benzyl-piperidine-1-carbonyl)-1H-indole-3-carboxylicacid[2-(3,5-dimethoxy-phenyl)-ethyl]-amide; (4-Benzyl-piperidin-1-yl)-(6-methoxy-1H-indol-5-yl)-methanone; 1-[5-(4-Benzyl-piperidine-1-carbonyl)-1H-indol-3-yl]-2,2,2-trifluoro-ethanone 5-(4-Benzyl-piperidine-1-carbonyl)-6-methoxy-1H-indole-3-carboxylic acid (2-dimethylamino-ethyl)-amide; 5-(4-Benzyl-piperidine-1-carbonyl)-1H-indole-3-carboxylic acid; 5-(4-Benzyl-piperidine-1-carbonyl)-1H-indole-3-carboxylic acid (2-dimethylamino-ethyl)-amide; (1H-Benzoimidazol-5-yl)-(4-benzyl-piperidin-1-yl)-methanone; (1H-Benzoimidazol-5-yl)-[4-(4-fluoro-benzyl)-piperidin-1-yl]-methanone; (4-Benzyl-piperidin-1-yl)-(3-morpholin-4-ylmethyl-1H-indol-5-yl)-methanone; 1-[6-(4-Benzyl-piperidine-1-carbonyl)-1H-indol-3-yl]-2,2,2-trifluoro-ethanone; (4-Benzyl-piperidin-1-yl)-[1-(pyridine-4-carbonyl)-1H-indol-6-yl]-methanone; (3-Benzyl-8-aza-bicyclo[3.2.1 ]oct-8-yl)-(6-methoxy-1H-indol-5-yl)-methanone; (3H-Benzoimidazol-5-yl)-(3-benzyl-8-aza-bicyclo[3.2.1]oct-8-yl)-methanone; [3-(4-Fluoro-benzyl)-pyrrolidin-1-yl]-(1H-indol-6-yl)-methanone; (1H-Benzoimidazol-5-yl)-[4-(2,6-difluoro-benzyl)-piperazin-1-yl]-methanone; (1H-Benzoimidazol-5-yl)-[4-(4-methylsulfanyl-benzyl)-piperazin-1-yl]-methanone; (1H-Benzoimidazol-5-yl)-[4-(2,3-difluoro-benzyl)-piperazin-1-yl]-methanone; (1H-Benzoimidazol-5-yl)-[4-(3,5-difluoro-benzyl)-piperazin-1-yl]-methanone; (1H-Benzoimidazol-5-yl)-[4-(3-chloro-benzyl)-piperazin-1-yl]-methanone; 4-[4-(1H-Benzoimidazole-5-carbonyl)-piperazin-1-ylmethyl]-benzoic acid methyl ester; (1H-Benzoimidazol-5-yl)-[4-(4-methoxy-benzyl)-piperazin-1-yl]-methanone; (1H-Benzoimidazol-5-yl)-[4-(4-trifluoromethoxy-benzyl)-piperazin-1-yl]-methanone; (1H-Benzoimidazol-5-yl)-[4-(4-methyl-benzyl)-piperazin-1-yl]-methanone; (1H-Benzoimidazol-5-yl)-[4-(2,4-dichloro-benzoyl)-piperazin-1-yl]-methanone; (1H-Benzoimidazol-5-yl)-[4-(3,4-dichloro-benzoyl)-piperazin-1-yl]-methanone; trans-1-[4-(1H-Benzoimidazole-5-carbonyl)-piperazin-1-yl]-3-(3-trifluoromethyl-phenyl)-propenone; (1H-Benzoimidazol-5-yl)-[4-(4-chloro-benzoyl)-piperazin-1-yl]-methanone; (1H-Benzoimidazol-5-yl)-(4-benzoyl-piperazin-1-yl)-methanone; (1H-Benzoimidazol-5-yl)-[4-(2-trifluoromethyl-benzoyl)-piperazin-1-yl]-methanone; (1H-Benzoimidazol-5-yl)-[4-(4-methoxy-benzoyl)-piperazin-1-yl]-methanone; (1H-Benzoimidazol-5-yl)-[4-(3,4-dichloro-phenyl)-piperazin-1-yl]-methanone; (1H-Benzoimidazol-5-yl)-{4-[(4-chloro-phenyl)-phenyl-methyl]-piperazin-1-yl }-methanone; trans-(1H-Benzoimidazol-5-yl)-[4-(3-phenyl-allyl)-piperazin-1-yl]-methanone; (1H-Benzoimidazol-5-yl)-{4-[bis-(4-fluoro-phenyl)-methyl]-piperazin-1-yl}-methanone; (1H-Benzoimidazol-5-yl)-[4-(4-chloro-benzyl)-piperazin-1-yl]-methanone; (1 H-Benzoimidazol-5-yl)-[4-(2-chloro-benzyl)-piperazin-1-yl]-methanone; (1H-Benzoimidazol-5-yl)-[4-(3,4,5-trimethoxy-benzyl)-piperazin-1-yl]-methanone; (1H-Benzoimidazol-5-yl)-[4-(4-diethylamino-benzyl)-piperazin-1-yl]-methanone; (1H-Benzoimidazol-5-yl)-(4-biphenyl-4-ylmethyl-piperazin-1-yl)-methanone; (1H-Benzoimidazol-5-yl)-[4-(4-phenoxy-benzyl)-piperazin-1-yl]-methanone; (4-Benzyl-piperidin-1-yl)-(6-methoxy-1H-benzoimidazol-5-yl)-methanone; (4-Benzyl-piperidin-1-yl)-(1-isopropyl-1H-benzoimidazol-5-yl)-methanone; (4-Benzyl-piperidin-1-yl)-(3-isopropyl-3H-benzoimidazol-5-yl)-methanone; (4-Benzyl-piperidin-1-yl)-(1-isopropyl-1H-indol-5-yl)-methanone; [4-(4-Chloro-benzyl)-piperazin-1-yl]-(1-isopropyl-1H-indol-5-yl)-methanone; (1H-Benzotriazol-5-yl)-(4-benzyl-piperidin-1-yl)-methanone; (4-Benzyl-piperidin-1-yl)-(1-isopropyl-1H-benzotriazol-5-yl)-methanone; [4-(4-Chloro-benzyl)-piperidin-1-yl]-(1H-indol-5-yl)-methanone; [4-(3-Chloro-benzyl)-piperidin-1-yl]-(1 H-indol-5-yl)-methanone; [4-(2-Chloro-benzyl)-piperidin-1-yl]-(1H-indol-5-yl)-methanone; (4-Benzyl-2-methyl-piperidin-1-yl)-(1H-indol-5-yl)-methanone; (4-Benzyl-piperidin-1-yl)-(4-chloro-1H-indol-5-yl)-methanone; (4-Benzyl-piperidin-1-yl)-[7-chloro-1-(pyridine-3-carbonyl)-1H-indol-6-yl]-methanone; (4-Benzyl-piperidin-1-yl)-(5-chloro-1H-indol-6-yl)-methanone; (4-Benzyl-piperidin-1-yl)-(7-chloro-1H-indol-6-yl)-methanone; 6-(4-Benzyl-piperidine-1-carbonyl)-7-chloro-1-(pyridine-3-carbonyl)-1H-indole-3-carboxylic acid (2-dimethylamino-ethyl)-amide; (4-Benzyl-piperidin-1-yl)-(1-pyridin-4-ylmethyl-1H-indol-5-yl)-methanone; (4-Benzyl-piperidin-1-yl)-[6-methoxy-1-(pyridine-3-carbonyl)-1H-indol-5-yl]-methanone; [5-(4-Benzyl-piperidine-1-carbonyl)-indol-1-yl]-acetic acid methyl ester; 1-[5-(4-Benzyl-piperidine-1-carbonyl)-indol-1-yl]-3-isopropylamino-propan-1-one; 1-[5-(4-Benzyl-piperidine-1-carbonyl)-indol-1-yl]-3-piperazin-1-yl-propan-1-one; 3-Benzylamino-1-[5-(4-benzyl-piperidine-1-carbonyl)-indol-1-yl]-propan-1-one; 1-[5-(4-Benzyl-piperidine-1-carbonyl)-indol-1-yl]-3-morpholin-4-yl-propan-1-one; 2-[5-(4-Benzyl-piperidine-1-carbonyl)-indol-1-yl]-N-propyl-acetamide; (4-Benzyl-piperidin-1-yl)-[1-(2-diethylamino-ethyl)-6-methoxy-1H-indol-5-yl]-methanone; (4-Benzyl-piperidin-1-yl)-[1-(3-diethylamino-propyl)-1H-indol-5-yl]-methanone; (4-Benzyl-piperidin-1-yl)-[1-(2-diethylamino-ethyl)-1H-indol-5-yl]-methanone; (4-Benzyl-piperidin-1-yl)-[6-chloro-1-(3-diethylamino-propyl)-1H-indol-5-yl]-methanone; [1-(2-Diethylamino-ethyl)-1H-indol-5-yl]-[4-(4-fluoro-benzyl)-piperidin-1-yl]-methanone; (4-Benzyl-piperidin-1-yl)-[1-(3-diethylamino-propyl)-6-methoxy-1H-indol-5-yl]-methanone; 5-(4-Benzyl-piperidine-1-carbonyl)-1H-indole-3-carboxylic acid (2-amino-ethyl)-methyl-amide; 5-(4-Benzyl-piperidine-1-carbonyl)-1H-indole-3-carboxylic acid [2-(3 ,4-dimethoxy-phenyl)-ethyl]-amide; (4-Benzyl-piperidin-1-yl)-(3-diethylaminomethyl-1H-indol-5-yl)-methanone; [4-(4-Fluoro-benzyl)-piperidin-1-yl]-(6-methoxy-1H-indol-5-yl)-methanone; (4-Benzyl-piperidin-1-yl)-(1-pyridin-4-yl-1H-indol-5-yl)-methanone; and 4(4-Benzyl-piperidin-1-yl)-(4-chloro-2-methyl-1H-indol-5-yl)-methanone; or pharmaceutically acceptable salts, or derivatives, or esters, or analogs, of any of the foregoing compounds.

[0892] Of particular interest in some embodiments is use of any of the following SAPK inhibitor compounds, or pharmaceutically acceptable salts, or derivatives, or esters, or analogs, thereof:

[chemical structure]

[0893] which compound has the IUPAC designation ¹[2-(2-Chloro-phenyl)-quinazolin-4-yl]-pyridin-4-yl-amine. Also suitable for use are any of the following compounds: [2-(2,6-Dichloro-phenyl)-quinazolin-4-yl]-pyridin-4-yl-amine; Pyridin-4-yl-(2-o-tolyl-quinazolin-4-yl)-amine; [2-(2-Bromo-phenyl)-quinazolin-4-yl]-pyridin-4-yl-amine; [2-(2-Fluoro-phenyl)-quinazolin-4-yl]-pyridin-4-yl-amine; [2-(2,6-Difluoro-phenyl)-quinazolin-4-yl]-pyridin-4-yl-amine; (2-Phenyl-quinazolin-4-yl)-pyridin-4-yl-amine; [2-(4-Fluoro-phenyl)-quinazolin-4-yl]-pyridin-4-yl-amine; [2-(4-Methoxy-phenyl)-quinazolin-4-yl]-pyridin-4- yl-amine; [2-(3-Fluoro-phenyl)-quinazolin-4-yl]-pyridin-4-yl-amine; Isopropyl-(2-phenyl-quinazolin-4-yl)-pyridin-4-yl-amine; (4-Methoxy-benzyl)-(2-phenyl-quinazolin-4-yl)-pyridin-4-yl-amine; (2-Phenyl-quinazolin-4-yl)-pyridin-4-ylmethyl-amine; [2-(4-Chloro-phenyl)-quinazolin-4-yl]-pyridin-4-ylmethyl-amine; (2-Phenyl-quinazolin-4-yl)-pyridin-3-yl-amine; (2-Phenyl-quinazolin-4-yl)-pyridin-2-ylmethyl-amine; (2-Phenyl-quinazolin-4-yl)-pyridin-3-ylmethyl-amine; (2-Phenyl-quinazolin-4-yl)-(2-pyridin-2-yl-ethyl)-amine; (2-Phenyl-quinazolin-4-yl)-pyrimidin-4-yl-amine; (2-Phenyl-quinazolin-4-yl)-pyrimidin-2-yl-amine; Phenyl-(2-phenyl-quinazolin-4-yl)-amine; Benzyl-[2-(3-chloro-phenyl)-quinazolin-4-yl]-amine; 3-(2-Phenyl-quinazolin-4-ylamino)-phenol; 2-(2-Phenyl-quinazolin-4-ylamino)-phenol; 4-(2-Phenyl-quinazolin-4-ylamino)-phenol; (1H-Indol-4-yl)-(2-phenyl-quinazolin-4-yl)-amine; (1H-Indol-5-yl)-(2-phenyl-quinazolin-4-yl)-amine; (4-Methoxy-phenyl)-(2-phenyl-quinazolin-4-yl)-amine; (3-Methoxy-phenyl)-(2-phenyl-quinazolin-4-yl)-amine; (2-Methoxy-phenyl)-(2-phenyl-quinazolin-4-yl)-amine; 2-[4-(2-Phenyl-quinazolin-4-ylamino)-phenyl]-ethanol; 3-(2-Phenyl-quinazolin-4-ylamino)-benzonitrile; (2,5-Difluoro-benzyl)-(2-phenyl-quinazolin-4-yl)-amine; [4-(2-Butyl)-phenyl]-(2-phenyl-quinazolin-4-yl)-amine; N,N-Dimethyl-N′-(2-phenyl-quinazolin-4-yl)-benzene-1,4-diamine; [2-(2-Chloro-phenyl)-6,7-dimethoxy-quinazolin-4-yl]-pyridin-4-yl-amine; [2-(2-Fluoro-phenyl)-6-nitro-quinazolin-4-yl]-pyridin-4-yl-amine; 2-(2-Fluoro-phenyl)-N4-pyridin-4-yl-quinazoline-4,6-diamine; 2-(2-Fluoro-phenyl)-N4-pyridin-4-yl-quinazoline-4,7-diamine; 2-(2-Fluoro-phenyl)-N6-(3-methoxy-benzyl)-N4-pyridin-4-yl-quinazoline-4,6-diamine; 2-(2-Fluoro-phenyl)-N6-(4-methoxy-benzyl)-N4-pyridin-4-yl-quinazoline-4,6-diamine; N6-Isobutyl-2-(2-fluoro-phenyl)-N4-pyridin-4-yl-quinazoline-4,6-diamine; 2-(2-Fluoro-phenyl)-N6-(4-methylsulfanyl-benzyl)-N4-pyridin-4-yl-quinazoline-4,6-diamine; 4-(4-Pyridylamino)-2-(4-chlorophenyl)quinazoline; 2-Phenyl-4-(2-pyridylamino)-quinazoline; and [2-(2-Fluoro-phenyl)-pyrido[2,3-d]pyrimidin-4-yl]-pyridin-4-yl-amine; or pharmaceutically acceptable salts, or derivatives, or esters, or analogs, of any of the foregoing compounds.

[0894] A further suitable SAPK inhibitor is BIRB796 (1-(5-tert-butyl-2-p-tolyl-2H-pyrazol-3-yl)-3-[4-(2-morpholin-4-yl-e-thoxy)-naphthalen-1-yl]-urea); see U.S. Pat. No. 6,319,921.

[0895] BIRB796 has the following structure:

[chemical structure]

[0896] Also suitable for use are pharmaceutically active derivatives, analogs, esters, and salts of BIRB796.

[0897] Another suitable SAPK inhibitor is 2(1H)-quinazolinone, as shown below:

[chemical structure]

[0898] Also suitable for use are pharmaceutically active derivatives, analogs, esters, and salts of 2(1H)-quinazolinone.

[0899] Additionally suitable for use is VX-745 (Vertex Pharmaceuticals and Kissei Pharmaceutical Co.) VX-745 has been reported to inhibit several isotypes of p38, including p38-alpha, p38-beta and p38-gamma.

Pirfenidone and Analogs Thereof

[0900] Pirfenidone (5-methyl-1-phenyl-2-(1H)-pyridone) and specific pirfenidone analogs can be used to enhance the methods of treatment for HCV infection disclosed herein.
Pirfenidone [chemical structure]
Pirfenidone Analogs [chemical structure]
Descriptions for Substituents R₁, R₂, X

[0901] R₁: carbocyclic (saturated and unsaturated), heterocyclic (saturated or unsaturated), alkyls (saturated and unsaturated). Examples include phenyl, benzyl, pyrimidyl, naphthyl, indolyl, pyrrolyl, furyl, thienyl, imidazolyl, cyclohexyl, piperidyl, pyrrolidyl, morpholinyl, cyclohexenyl, butadienyl, and the like.

[0902] R₁ can further include substitutions on the carbocyclic or heterocyclic moieties with substituents such as halogen, nitro, amino, hydroxyl, alkoxy, carboxyl, cyano, thio, alkyl, aryl, heteroalkyl, heteroaryl and combinations thereof, for example, 4-nitrophenyl, 3-chlorophenyl, 2,5-dinitrophenyl, 4-methoxyphenyl, 5-methyl-pyrrolyl, 2,5-dichlorocyclohexyl, guanidinyl-cyclohexenyl and the like.

[0903] R₂: alkyl, carbocylic, aryl, heterocyclic, hydroxyl, alkoxy, carboxyl. Examples include: methyl, ethyl, propyl, isopropyl, phenyl, 4-nitrophenyl, thienyl, hydroxyl, methoxy, carboxy and the like.

[0904] X: may be any number (from 1 to 3) of substituents on the carbocyclic or heterocyclic ring. The substituents can be the same or different. Substituents can include hydrogen, alkyl, heteroalkyl, aryl, heteroaryl, halo, nitro, carboxyl, hydroxyl, cyano, amino, thio, alkylamino, haloaryl and the like.

[0905] The substituents may be optionally further substituted with 1-3 substituents from the group consisting of alkyl, aryl, nitro, alkoxy, hydroxyl and halo groups. Examples include: methyl, 2,3-dimethyl, phenyl, p-tolyl, 4-chlorophenyl, 4-nitrophenyl, 2,5-dichlorophenyl, furyl, thienyl and the like.

[0906] Specific Examples include those shown in Table 10:

TABLE 10

| IA | IIB |
|---|---|
| 5-Methyl-1-(2′pyidyl)-2-(1H) pyridine, | 6-Methyl-1-phenyl-3-(1H) pyridone, |
| 6-Methyl-1-phenyl-2-(1H) pyridone, | 5-Methyl-1-p-tolyl-3-(1H) pyridone, |
| 5-Methyl-3-phenyl-1-(2′-thienyl)-2-(1H) | 5-Methyl-1-(2′-naphthyl)-3-(1H) pyridone, |
| pyridone, | |
| 5-Methyl-1-(2′-naphthyl)-2-(1H) pyridone, | 5-Methyl-1-phenyl-3-(1H) pyridone, |
| 5-Methyl-1-p-tolyl-2-(1H) pyridone, | 5-Methyl-1-(5′-quinolyl)-3-(1H) pyridone, |
| 5-Methyl-1-(1′naphthyl)-2-(1H) pyridone, | 5-Ethyl-1-phenyl-3-(1H) pyridone, |
| 5-Ethyl-1-phenyl-2-(1H) pyridone, | 5-Methyl-1-(4′-methoxyphenyl)-3-(1H) |
| | pyridone, |
| 5-Methyl-1-(5′-quinolyl)-2-(1H) pyridone, | 4-Methyl-1-phenyl-3-(1H) pyridone, |
| 5-Methyl-1-(4′-quinolyl)-2-(1H) pyridone, | 5-Methyl-1-(3′-pyridyl)-3-(1H) pyridone, |
| 5-Methyl-1-(4′-pyridyl)-2-(1H) pyridone, | 5-Methyl-1-(2′-Thienyl)-3-(1H) pyridone, |
| 3-Methyl-1-phenyl-2-(1H) pyridone, | 5-Methyl-1-2′-pyridyl)-3-(1H) pyridone, |
| 5-Methyl-1-(4′-methoxyphenyl)-2-(1H) | 5-Methyl-1-(2′-quinolyl)-3-(1H) pyridone, |
| pyridone, | |
| 1-Phenyl-2-(1H) pyridone, | 1-Phenyl-3-(1H) pyridine, |
| 1,3-Diphenyl-2-(1H) pyridone, | 1-(2′-Furyl)-5-methyl-3-(1H) pyridone, |
| 1,3-Diphenyl-5-methyl-2-(1H) pyridone, | 1-(4′-Chlorophenyl)-5-methyl-3-(1H) pyridine. |
| 5-Methyl-1-(3′-trifluoromethylphenyl)-2- | |
| (1H)-pyridone, | |
| 3-Ethyl-1-phenyl-2-(1H) pyridone, | |
| 5-Methyl-1-(3′-pyridyl)-2-(1H) pyridone, | |
| 5-Methyl-1-(3-nitrophenyl)-2-(1H) | |
| pyridone, | |
| 3-(4′-Chlorophenyl)-5-Methyl-1-phenyl-2- | |
| (1H) pyridone, | |
| 5-Methyl-1-(2′-Thienyl)-2-(1H) pyridone, | |
| 5-Methyl-1-(2′-thiazolyl)-2-(1H) pyridone, | |
| 3,6-Dimethyl-1-phenyl-2-(1H) pyridone, | |
| 1-(4′Chlorophenyl)-5-Methyl-2-(1H) | |
| pyridone, | |
| 1-(2′-Imidazolyl)-5-Methyl-2-(1H) | |
| pyridone, | |
| 1-(4′-Nitrophenyl)-2-(1H) pyridone, | |
| 1-(2′-Furyl)-5-Methyl-2-(1H) pyridone, | |
| 1-Phenyl-3-(4′-chlorophenyl)-2-(1H) | |
| pyridine. | |

[0907] U.S. Pat. Nos. 3,974,281; 3,839,346; 4,042,699; 4,052,509; 5,310,562; 5,518,729; 5,716,632; and 6,090,822 describe methods for the synthesis and formulation of pirfenidone and specific pirfenidone analogs in pharmaceutical compositions suitable for use in the methods of the present invention.

TNF Antagonists

[0908] Suitable TNF-α antagonists for use herein include agents that decrease the level of TNF-α synthesis, agents that block or inhibit the binding of TNF-α to a TNF-α receptor (TNFR), and agents that block or inhibit TNFR-mediated signal transduction. Unless otherwise expressly stated, every reference to a “TNF-α antagonist” or “TNF antagonist” herein will be understood to mean a TNF-α antagonist other than SAPK inhibitors (including pirfenidone and pirfenidone analogs).

[0909] As used herein, the terms “TNF receptor polypeptide” and “TNFR polypeptide” refer to polypeptides derived from TNFR (from any species) that are capable of binding TNF. Two distinct cell-surface TNFRs have described: Type II TNFR (or p75 TNFR or TNFRII) and Type I TNFR (or p55 TNFR or TNFRI). The mature full-length human p75 TNFR is a glycoprotein having a molecular weight of about 75-80 kilodaltons (kD). The mature full-length human p55 TNFR is a glycoprotein having a molecular weight of about 55-60 kD. Exemplary TNFR polypeptides are derived from TNFR Type I and/or TNFR type II. Soluble TNFR includes p75 TNFR polypeptide; fusions of p75 TNFR with heterologous fusion partners, e.g., the Fc portion of an immunoglobulin.

[0910] TNFR polypeptide may be an intact TNFR or a suitable fragment of TNFR. U.S. Pat. No. 5,605,690 provides examples of TNFR polypeptides, including soluble TNFR polypeptides, appropriate for use in the present invention. In many embodiments, the TNFR polypeptide comprises an extracellular domain of TNFR. In some embodiments, the TNFR polypeptide is a fusion polypeptide comprising an extracellular domain of TNFR linked to a constant domain of an immunoglobulin molecule. In other embodiments, the TNFR polypeptide is a fusion polypeptide comprising an extracellular domain of the p75 TNFR linked to a constant domain of an IgG1 molecule. In some embodiments, when administration to humans is contemplated, an Ig used for fusion proteins is human, e.g., human IgG1.

[0911] Monovalent and multivalent forms of TNFR polypeptides may be used in the present invention. Multivalent forms of TNFR polypeptides possess more than one TNF binding site. In some embodiments, the TNFR is a bivalent, or dimeric, form of TNFR. For example, as described in U.S. Pat. No. 5,605,690 and in Mohler et al., 1993, J. Immunol., 151:1548-1561, a chimeric antibody polypeptide with TNFR extracellular domains substituted for the variable domains of either or both of the immunoglobulin heavy or light chains would provide a TNFR polypeptide for the present invention. Generally, when such a chimeric TNFR:antibody polypeptide is produced by cells, it forms a bivalent molecule through disulfide linkages between the immunoglobulin domains. Such a chimeric TNFR:antibody polypeptide is referred to as TNFR:Fc.

[0912] In one embodiment, a subject method involves administration of an effective amount of the soluble TNFR ENBREL® etanercept. ENBREL® is a dimeric fusion protein consisting of the extracellular ligand-binding portion of the human 75 kilodalton (p75) TNFR linked to the Fc portion of human IgG1. The Fc component of ENBREL® contains the CH2 domain, the CH3 domain and hinge region, but not the CH1 domain of IgG1. ENBREL® is produced in a Chinese hamster ovary (CHO) mammalian cell expression system. It consists of 934 amino acids and has an apparent molecular weight of approximately 150 kilodaltons. Smith et al. (1990) Science 248:1019-1023; Mohler et al. (1993) J Immunol. 151:1548-1561; U.S. Pat. Nos. 5,395,760; and 5,605,690.

[0913] Also suitable for use are monoclonal antibodies that bind TNF-α. Monoclonal antibodies include “humanized” mouse monoclonal antibodies; chimeric antibodies; monoclonal antibodies that are at least about 80%, at least about 90%, at least about 95%, or 100% human in amino acid sequence; and the like. See, e.g., WO 90/10077; WO 90/04036; and WO 92/02190. Suitable monoclonal antibodies include antibody fragments, such as Fv, F(ab′)₂ and Fab; synthetic antibodies; artificial antibodies; phage display antibodies; and the like.

[0914] Examples of suitable monoclonal antibodies include infliximab (REMICADE®, Centocor); and adalimumab (HUMIRA™, Abbott) REMICADE® is a chimeric monoclonal anti-TNF-α antibody that includes about 25% mouse amino acid sequence and about 75% human amino acid sequence. REMICADE® comprises a variable region of a mouse monoclonal anti-TNF-α antibody fused to the constant region of a human. IgG1. Elliott et al. (1993) Arthritis Rheum. 36:1681-1690; Elliott et al. (1994) Lancet 344:1105-1110; Baert et al. (1999) Gastroenterology 116:22-28. HUMIRA™ is a human, full-length IgG1 monoclonal antibody that was identified using phage display technology. Piascik (2003) J Am. Pharm. Assoc. 43:327-328.

[0915] Methods to assess TNF antagonist activity are known in the art and exemplified herein. For example, TNF antagonist activity may be assessed with a cell-based competitive binding assay. In such an assay, radiolabeled TNF is mixed with serially diluted TNF antagonist and cells expressing cell membrane bound TNFR. Portions of the suspension are centrifuged to separate free and bound TNF and the amount of radioactivity in the free and bound fractions determined. TNF antagonist activity is assessed by inhibition of TNF binding to the cells in the presence of the TNF antagonist.

[0916] As another example, TNF antagonists may be analyzed for the ability to neutralize TNF activity in vitro in a bioassay using cells susceptible to the cytotoxic activity of TNF as target cells. In such an assay, target cells, cultured with TNF, are treated with varying amounts of TNF antagonist and subsequently are examined for cytolysis. TNF antagonist activity is assessed by a decrease in TNF-induced target cell cytolysis in the presence of the TNF antagonist.

TGF-βAntagonists

[0917] TGF-β antagonists suitable for use in a subject treatment method include agents that decrease the level of TGF-β synthesis, agents that block or inhibit the binding of TGF-β to a TGF-P receptor, and agents that block or inhibit TGF-β receptor-mediated signal transduction. As used herein, the term “TGF-β antagonist” refers to any agent that decreases the level of TGF-β synthesis, any agent that blocks or inhibits the binding of TGF-β to a TGF-β receptor, and any agent that blocks or inhibits TGF-β receptor-mediated signal transduction. Unless otherwise expressly stated, every reference to a “TGF-β antagonist” herein will be understood to mean a TGF-β antagonist other than SAPK inhibitors (including pirfenidone and pirfenidone analogs). As used herein, the term “TGF-β ” includes any TGF-β subtype, including TGF-β, TGF-β2, and TGF-β3 Suitable TGF-β antagonists include, but are not limited to, antibodies specific for TGF-β (including antibodies specific for a particular TGF-β subtype; and antibodies cross-reactive with two or more TGF-β subtypes); antibodies to TGF-β receptor; soluble TGF-β receptor; decorin; and agents that inhibit TGF-β signaling.

[0918] Suitable TGF-β antagonists include antibodies specific for TGF-β. Antibodies specific for TGF-β are known in the art. See, e.g., U.S. Pat. Nos. 5,783,185, 5,772,998, 5,674,843, 5,571,714, 5,462,925, and 5,426,098; WO 97/13844; and U.S. Patent Publication Nos 20030064069 and 20030091566. Non-limiting examples of suitable anti-TGF-βantibodies include CAT-152 (lerdelibumab; Trabio™; Cambridge Antibody Technology), a human anti-TGF-β2 monoclonal antibody; CAT-192 (metelimumab; Cambridge Antibody Technology), a human anti-TGF-β1 monoclonal antibody; and GC-1008 (Genzyme Corp.), a pan-specific human monoclonal antibody to TGF-β1, TGF-β2, and TGF-β3.

[0919] Suitable TGF-β antagonists include soluble TGF-β receptors. Soluble TGF-β receptors typically lack most or all of the transmembrane portion of a naturally-occurring TGF-β receptor, such that the protein is not membrane bound, yet retains TGF-β binding. Soluble TGF-β receptors include soluble fusion proteins comprising a portion of a TGF-β receptor fused in-frame to a heterologous (non-TGF-β receptor) protein (a “fusion partner”). Non-limiting examples of fusion partners are immunoglobulin Fc, poly-histidine, and the like. Soluble TGF-β receptors have been described in the art. See, e.g., Wang et al. (1999) Thorax 54:805-812; George et al. (1999) Proc. Natl. Acad. Sci. USA 96:12719-12724; Muraoka et al. (2002) J Clin. Invest. 109:1551-1559; and Yata et al. (2002) Hepatology 35:1022-1030.

[0920] TGF-β antagonists include Gleevec™. Gleevec™ (also known as STI-571, or CGP57148B) has the chemical name 4-[(4-methyl-1-piperazinyl)methyl]-N-[4-methyl-3-[[4-(3-pyridinyl)-2-pyrimidinyl]amino-phenyl]benzamide methanesulfonate is commonly known as imatinib mesylate and sold under the trademark Gleevec™. Gleevec™ is a 2-phenylaminopyrimidine that targets the ATP-binding site of the kinase domain of Bcr-Abl tyrosine kinase (see, e.g. Druker et al. (1996) Nature Med. 2, 561; and Buchdunger et al. (1993) Proc. Natl. Acad. Sci. USA 92:2558-2562).

[0921] In certain embodiments, the agents are pyrimidine derivatives as described in U.S. Pat. No. 5,521,184, the disclosure of which is herein incorporated by reference. In these embodiments, of interest are N-phenyl-2-pyrimidine-amine derivatives of formula (I):

[chemical structure]

[0922] wherein

[0923] R_{9′} is hydrogen or lower alkyl,

[0924] X is oxo, thio, imino, N-lower alkyl-imino, hydroximino or O-lower alkyl-hydroximino,

[0925] Y is oxygen or the group NH,

[0926] k is 0 or 1 and

[0927] R₁₀ is an aliphatic radical having at least 5 carbon atoms, or an aromatic, aromatic-aliphatic, cycloaliphatic, cycloaliphatic-aliphatic, heterocyclic or heterocyclic-aliphatic radical,

[0928] and the remaining radicals R_{4′}, R_{5′}, R_{6′}, R_{7′}and R_{8′} are each independently of the others hydrogen, lower alkyl that is unsubstituted or substituted by free or alkylated amino, piperazinyl, piperidinyl, pyrrolidinyl or by morpholinyl, or lower alkanoyl, trifluoromethyl, free, etherified or esterifed hydroxy, free, alkylated or acylated amino or free or esterified carboxy,

[0929] and salts of such compounds having at least one salt-forming group.

[0930] In these embodiments:

[0931] 1-Methyl-1H-pyrrolyl is preferably 1-methyl-1H-pyrrol-2-yl or 1-methyl-1H-pyrrol-3-yl.

[0932] Amino- or amino-lower alkyl-substituted phenyl R₁ wherein the amino group in each case is free, alkylated or acylated, is phenyl substituted in any desired position (ortho, meta or para) wherein an alkylated amino group is preferably mono- or di-lower alkylamino, for example dimethylamino, and the lower alkyl moiety of amino-lower alkyl is preferably linear C₁-C₃ alkyl, such as especially methyl or ethyl.

[0933] 1H-Indolyl bonded at a carbon atom of the five-membered ring is 1H-indol-2-yl or 1H-indol-3-yl.

[0934] Unsubstituted or lower alkyl-substituted pyridyl bonded at a ring carbon atom is lower alkyl-substituted or preferably unsubstituted 2-, or preferably 3- or 4-pyridyl, for example 3-pyridyl, 2-methyl-3-pyridyl, 4-methyl-3-pyridyl or 4-pyridyl. Pyridyl substituted at the nitrogen atom by oxygen is a radical derived from pyridine N-oxide, i.e., N-oxido-pyridyl, e.g. N-oxido-4-pyridyl.

[0935] Fluoro-substituted lower alkoxy is lower alkoxy carrying at least one, but preferably several, fluoro substituents, especially trifluoromethoxy or preferably 1,1,2,2-tetrafluoro-ethoxy.

[0936] When X is oxo, thio, imino, N-lower alkyl-imino, hydroximino or O-lower alkyl-hydroximino, the group C═X is, in the above order, a radical C═O, C═S, C═N—H, C═N—lower alkyl, C═N—OH or CN—O— lower alkyl, respectively. X is preferably oxo.

[0937] k is preferably 0, i.e., the group Y is not present.

[0938] Y, if present, is preferably the group NH.

[0939] The term “lower” within the scope of this text denotes radicals having up to and including 7, preferably up to and including 4 carbon atoms.

[0940] Lower alkyl R_{1′}, R_{2′}, R_{3′} and R_{9′} is preferably methyl or ethyl.

[0941] An aliphatic radical R₁₀ having at least 5 carbon atoms preferably has not more than 22 carbon atoms, generally not more than 10 carbon atoms, and is such a substituted or preferably unsubstituted aliphatic hydrocarbon radical, that is to say such a substituted or preferably unsubstituted alkynyl, alkenyl or preferably alkyl radical, such as C₅-C₇ alkyl, for example n-pentyl. An aromatic radical R₁₀ has up to 20 carbon atoms and is unsubstituted or substituted, for example in each case unsubstituted or substituted naphthyl, such as especially 2-naphthyl, or preferably phenyl, the substituents preferably being selected from cyano, unsubstituted or hydroxy-, amino- or 4-methyl-piperazinyl-substituted lower alkyl, such as especially methyl, trifluoromethyl, free, etherified or esterified hydroxy, free, alkylated or acylated amino and free or esterified carboxy. In an aromatic-aliphatic radical R₁₀ the aromatic moiety is as defined above and the aliphatic moiety is preferably lower alkyl, such as especially C₁-C₂ alkyl, which is substituted or preferably unsubstituted, for example benzyl. A cycloaliphatic radical R₁₀ has especially up to 30, more especially up to 20, and most especially up to 10 carbon atoms, is mono-or poly-cyclic and is substituted or preferably unsubstituted, for example such a cycloalkyl radical, especially such a 5- or 6-membered cycloalkyl radical, such as preferably cyclohexyl. In a cycloaliphatic-aliphatic radical R₁₀ the cycloaliphatic moiety is as defined above and the aliphatic moiety is preferably lower alkyl, such as especially C₁-C₂ alkyl, which is substituted or preferably unsubstituted. A heterocyclic radical R₁₀ contains especially up to 20 carbon atoms and is preferably a saturated or unsaturated monocyclic radical having 5 or 6 ring members and 1-3 hetero atoms which are preferably selected from nitrogen, oxygen and sulfur, especially, for example, thienyl or 2-, 3- or 4-pyridyl, or a bi- or tri-cyclic radical wherein, for example, one or two benzene radicals are annellated (fused) to the mentioned monocyclic radical. In a heterocyclic-aliphatic radical R₁₀ the heterocyclic moiety is as defined above and the aliphatic moiety is preferably lower alkyl, such as especially C₁-C₂ alkyl, which is substituted or preferably unsubstituted.

[0942] Etherified hydroxy is preferably lower alkoxy. Esterified hydroxy is preferably hydroxy esterified by an organic carboxylic acid, such as a lower alkanoic acid, or a mineral acid, such as a hydrohalic acid, for example lower alkanoyloxy or especially halogen, such as iodine, bromine or especially fluorine or chlorine.

[0943] Alkylated amino is, for example, lower alkylamino, such as methylamino, or di-lower alkylamino, such as dimethylamino. Acylated amino is, for example, lower alkanoylamino or benzoylamino.

[0944] Esterified carboxy is, for example, lower alkoxycarbonyl, such as methoxycarbonyl.

[0945] A substituted phenyl radical may carry up to 5 substituents, such as fluorine, but especially in the case of relatively large substituents is generally substituted by only from 1 to 3 substituents. Examples of substituted phenyl that may be given special mention are 4-chloro-phenyl, pentafluoro-phenyl, 2-carboxy-phenyl, 2-methoxy-phenyl, 4-fluorophenyl, 4-cyano-phenyl and 4-methyl-phenyl.

[0946] Salt-forming groups in a compound of formula (I) are groups or radicals having basic or acidic properties. Compounds having at least one basic group or at least one basic radical, for example a free amino group, a pyrazinyl radical or a pyridyl radical, may form acid addition salts, for example with inorganic acids, such as hydrochloric acid, sulfuric acid or a phosphoric acid, or with suitable organic carboxylic or sulfonic acids, for example aliphatic mono- or di-carboxylic acids, such as trifluoroacetic acid, acetic acid, propionic acid, glycolic acid, succinic acid, maleic acid, fumaric acid, hydroxymaleic acid, malic acid, tartaric acid, citric acid or oxalic acid, or amino acids such as arginine or lysine, aromatic carboxylic acids, such as benzoic acid, 2-phenoxy-benzoic acid, 2-acetoxybenzoic acid, salicylic acid, 4-aminosalicylic acid, aromatic-aliphatic carboxylic acids, such as mandelic acid or cinnamic acid, heteroaromatic carboxylic acids, such as nicotinic acid or isonicotinic acid, aliphatic sulfonic acids, such as methane-, ethane- or 2-hydroxyethane-sulfonic acid, or aromatic sulfonic acids, for example benzene-, p-toluene- or naphthalene-2-sulfonic acid. When several basic groups are present mono- or poly-acid addition salts may be formed.

[0947] Compounds of formula (I) having acidic groups, for example a free carboxy group in the radical R₁₀, may form metal or ammonium salts, such as alkali metal or alkaline earth metal salts, for example sodium, potassium, magnesium or calcium salts, or ammonium salts with ammonia or suitable organic amines, such as tertiary monoamines, for example triethylamine or tri-(2-hydroxyethyl)-amine, or heterocyclic bases, for example N-ethylpiperidine or N,N′-dimethyl-piperazine.

[0948] Compounds of formula (I) having both acidic and basic groups can form internal salts.

[0949] Of particular interest in these embodiments is a pyrimidine derivative in which R_{1′} is 3-pyridyl, R_{2′}, R_{3′}, R_{5′}, R_{6′}, and R_{8′} are each hydrogen, R_{4′} is methyl, and R_{7′} is a group of formula (II) in which R_{9′} is hydrogen, X is oxo, k is 0, and R₁₀ is 4-[(4-methyl-1-piperazinyl)methyl]phenyl. The mesylate salt of this compound having the chemical name 4-[(4-methyl-1-piperazinyl)methyl]-N-[4-methyl-3-[[4-(3-pyridinyl)-2-pyrimidinyl]amino-phenyl]benzamide methanesulfonate is now commonly known as imatinib mesylate and sold under the trademark Gleevec™.

Endothelin Receptor Antagonists

[0950] Endothelin antagonists suitable for use in the present invention include gents that decrease the level of endothelin synthesis, agents that block or inhibit the binding of endothelin to an endothelin receptor, and agents that block or inhibit endothelin receptor-mediated signal transduction. As used herein, the term “endothelin antagonist” refers to any agent that decreases the level of endothelin synthesis, any agent that blocks or inhibits the binding of endothelin to an endothelin receptor, and any agent that blocks or inhibits endothelin receptor-mediated signal transduction.

[0951] In some embodiments, an endothelin receptor antagonist is selective for endothelin A (ETA) receptors. In some embodiments, an endothelin receptor antagonist is selective for endothelin B (ETB) receptors. In other embodiments, an endothelin receptor antagonist is an antagonist of both ETA and ETB receptors.

[0952] Specific examples of endothelin antagonists useful in the present invention include, but are not limited to, atrasentan (ABT-627; Abbott Laboratories), Veletri™ (tezosentan; Actelion Pharmaceuticals, Ltd.), sitaxsentan (ICOS-Texas Biotechnology), enrasentan (GlaxoSmithKline), darusentan (LU135252; Myogen) BMS-207940 (Bristol-Myers Squibb), BMS-193884 (Bristol-Myers Squibb), BMS-182874 (Bristol-Myers Squibb), J-104132 (Banyu Pharmaceutical), VML 588/Ro 61-1790 (Vanguard Medica), T-0115 (Tanabe Seiyaku), TAK-044 (Takeda), BQ-788 (Banyu Pharmaceutical), BQ123, YM-598 (Yamanouchi Pharma), PD 145065 (Parke-Davis), A-127722 (Abbott Laboratories), A-192621 (Abbott Laboratories), A-182086 (Abbott Laboratories), TBC3711 (ICOS-Texas Biotechnology), BSF208075 (Myogen), S-0139 (Shionogi), TBC2576 (Texas Biotechnology), TBC3214 (Texas Biotechnology), PD156707 (Parke-Davis), PD180988 (Parke-Davis), ABT-546 (Abbott Laboratories), ABT-627 (Abbott Laboratories), SB247083 (GlaxoSmithKline), SB 209670 (GlaxoSmithKline); and an endothelin receptor antagonists discussed in the art, e.g., Davenport and Battistini (2002) Clinical Science 103:15-35, Wu-Wong et al. (2002) Clinical Science 103:1075-1115, and Luescher and Barton (2000) Circulation 102:2434-2440.

[0953] A suitable endothelin receptor antagonist is TRACLEER™ (bosentan; manufactured by Actelion Pharmaceuticals, Ltd.). TRACLEER™ is an orally active dual endothelin receptor antagonist, and blocks the binding of endothelin to both of its receptors endothelin receptor A and endothelin receptor B.

[0954] TRACLEER™ belongs to a class of highly substituted pyrimidine derivatives, with no chiral centers. It is designated chemically as 4-tert-butyl-N-[6-(2-hydroxy-ethoxy)-5-(2-methoxy-phenoxy)-[2,2′]-bipyrimidin-4-yl]-benzenesulfonamide monohydrate and has the following structural formula:

[chemical structure]

[0955] TRACLEER™ treatment is in some embodiments administered at a dose of 62.5 mg bid orally for 4 weeks, followed by a maintenance dose of 125 mg bid orally.

N-Acetylcysteine (NAC)

[0956] N-acetylcysteine (NAC) is a stable form of the sulfur amino acid L-cysteine. NAC is an anti-oxidant that scavenges H₂O₂ and other radicals. It is a precursor of glutathione (a major antioxidant), providing cysteine substrate for glutathione synthesis. NAC is commercially available as an over-the-counter nutritional supplement or nutraceutical product. Suitable NAC products for use herein include the NAC nutritional supplement products made by Source Naturals (1000 mg tablets), Biochem (750 mg tablets), Twinlab (600 mg tablets), Nutricology/Allergy Research Group (500 mg tablets), and the like. Such products can be purchased at minimal cost from health food stores and nutritional supplement retailers, such as General Nutrion Corporation (GNC).

Thymosin-α

[0957] Thymosin-α (Zadaxin™; available from SciClone Pharmaceuticals, Inc., San Mateo, Calif.) is a synthetic form of thymosin alpha 1, a hormone found naturally in the circulation and produced by the thymus gland. Thymosin-α increases activity of T cells and NK cells. Zadaxin™ formulated for subcutaneous injection is a purified sterile lyophilized preparation of chemically synthesized thymosin alpha 1 identical to human thymosin alpha 1. Thymosin alpha 1 is an acetylated polypeptide with the following sequence: Ac-Ser-Asp-Ala-Ala-Val-Asp-Thr-Ser-Ser-Glu-lle-Thr-Thr-Lys-Asp-Leu-Lys-Glu-Lys-Lys-Glu-Val-Val-Glu-Glu-Ala-Glu-Asn-Oh (SEQ ID NO: 103), and having a molecular weight of 3,108 daltons. The lyophilized preparation contains 1.6 mg synthetic thymosin-α, 50 mg mannitol, and sodium phosphate buffer to adjust the pH to 6.8.

Ribavirin

[0958] Ribavirin, 1-β-D-ribofuranosyl-1H-1,2,4-triazole-3-carboxamide, available from ICN Pharmaceuticals, Inc., Costa Mesa, Calif., is described in the Merck Index, compound No. 8199, Eleventh Edition. Its manufacture and formulation is described in U.S. Pat. No. 4,211,771. The invention also contemplates use of derivatives of ribavirin (see, e.g., U.S. Pat. No. 6,277,830). The ribavirin may be administered orally in capsule or tablet form, or in the same or different administration form and in the same or different route as the IFN-α (either PEGylated or non-PEGylated form). Of course, other types of administration of both medicaments, as they become available are contemplated, such as by nasal spray, transdermally, by suppository, by sustained release dosage form, etc. Any form of administration will work so long as the proper dosages are delivered without destroying the active ingredient.

[0959] Ribavirin is generally administered in an amount ranging from about 400 mg to about 1200 mg, from about 600 mg to about 1000 mg, or from about 700 to about 900 mg per day. In some embodiments, ribavirin is administered throughout the entire course of PEGylated IFN-α or non-PEGylated IFN-α therapy. In other embodiments, ribavirin is administered only during the first period of time. In still other embodiments, ribavirin is administered only during the second period of time.

Levovirin

[0960] Levovirin is the L-enantiomer of ribavirin, and exhibits the property of enhancing a Th1 immune response over a Th2 immune response. Levovirin is manufactured by ICN Pharmaceuticals.

[0961] Levovirin has the following structure: [chemical structure]
Viramidine

[0962] Viramidine is a 3-carboxamidine derivative of ribavirin, and acts as a prodrug of ribavirin. It is efficiently converted to ribavirin by adenosine deaminases.

[0963] Viramidine has the following structure: [chemical structure]
Nucleoside Analogs

[0964] Nucleoside analogs that are suitable for use in a subject therapy include, but are not limited to, ribavirin, levovirin, viramidine, isatoribine, an L-ribofuranosyl nucleoside as disclosed in U.S. Pat. No. 5,559,101 and encompassed by Formula I of U.S. Pat. No. 5,559,101 (e.g., 1-β-L-ribofuranosyluracil, 1-β-L-ribofuranosyl-5-fluorouracil, 1-β-L-ribofuranosylcytosine, 9-β-L-ribofuranosyladenine, 9-β-L-ribofuranosylhypoxanthine, 9-β-L-ribofuranosylguanine, 9-β-L-ribofuranosyl-6-thioguanine, 2-amino-α-L-ribofuranl[1′,2′:4,5]oxazoline, O²,O²-anhydro-1-α-L-ribofuranosyluracil, 1-α-L-ribofuranosyluracil, 1-(2,3,5-tri-O-benzoyl-α-ribofuranosyl)-4-thiouracil, 1-α-L-ribofuranosylcytosine, 1-α-L-ribofuranosyl-4-thiouracil, 1-α-L-ribofuranosyl-5-fluorouracil, 2-amino-β-L-arabinofurano[1′,2′:4,5]oxazoline, O²,O²-anhydro-β-L-arabinofuranosyluracil, 2′-deoxy-β-L-uridine, 3′5′-Di-O-benzoyl-2′ deoxy-4-thio β-L-uridine, 2′-deoxy-β-L-cytidine, 2′-deoxy-β-L-4-thiouridine, 2′-deoxy-p-L-thymidine, 2′-deoxy-β-L-5-fluorouridine, 2′,3′-dideoxy-β-L-uridine, 2′-deoxy-β-L-5-fluorouridine, and 2′-deoxy-β-L-inosine); a compound as disclosed in U.S. Pat. No. 6,423,695 and encompassed by Formula I of U.S. Pat. No. 6,423,695; a compound as disclosed in U.S. Patent Publication No. 2002/0058635, and encompassed by Formula 1 of U.S. Patent Publication No. 2002/0058635; a nucleoside analog as disclosed in WO 01/90121 A2 (Idenix); a nucleoside analog as disclosed in WO 02/069903 A2 (Biocryst Pharmaceuticals Inc.); a nucleoside analog as disclosed in WO 02/057287 A2 or WO 02/057425 A2 (both Merck/Isis); and the like.

HCV NS3 Inhibitors

[0965] Suitable HCV non-structural protein-3 (NS3) inhibitors include, but are not limited to, a tri-peptide as disclosed in U.S. Pat. Nos. 6,642,204, 6,534,523, 6,420,380, 6,410,531, 6,329,417, 6,329,379, and 6,323,180 (Boehringer-Ingelheim); a compound as disclosed in U.S. Pat. No. 6,143,715 (Boehringer-Ingelheim); a macrocyclic compound as disclosed in U.S. Pat. No. 6,608,027 (Boehringer-Ingelheim); an NS3 inhibitor as disclosed in U.S. Pat. Nos. 6,617,309, 6,608,067, and 6,265,380 (Vertex Pharmaceuticals); an azapeptide compound as disclosed in U.S. Pat. No. 6,624,290 (Schering); a compound as disclosed in U.S. Pat. No. 5,990,276 (Schering); a compound as disclosed in Pause et al. (2003) J Biol. Chem. 278:20374-20380; NS3 inhibitor BILN 2061 (Boehringer-Ingelheim; Lamarre et al. (2002) Hepatology 36:301A; and Lamarre et al. (Oct. 26, 2003) Nature doi:10.1038/nature02099); NS3 inhibitor VX-950 (Vertex Pharmaceuticals; Kwong et al. (Oct. 24-28, 2003) 54th Ann. Meeting AASLD); NS3 inhibitor SCH6 (Abib et al. (Oct. 24-28, 2003) Abstract 137. Program and Abstracts of the 54^{th} Annual Meeting of the American Association for the Study of Liver Diseases (AASLD). Oct. 24-28, 2003. Boston, Mass.); any of the NS3 protease inhibitors disclosed in WO 99/07733, WO 99/07734, WO 00/09558, WO 00/09543, WO 00/59929 or WO 02/060926 (e.g., compounds 2, 3, 5, 6, 8, 10, 11, 18, 19, 29, 30, 31, 32, 33, 37, 38, 55, 59, 71, 91, 103, 104, 105, 112, 113, 114, 115, 116, 120, 122, 123, 124, 125, 126 and 127 disclosed in the table of pages 224-226 in WO 02/060926); an NS3 protease inhibitor as disclosed in any one of U.S. Patent Publication Nos. 2003019067, 20030187018, and 20030186895; and the like.

[0966] Of particular interest in many embodiments are NS3 inhibitors that are specific NS3 inhibitors, e.g., NS3 inhibitors that inhibit NS3 serine protease activity and that do not show significant inhibitory activity against other serine proteases such as human leukocyte elastase, porcine pancreatic elastase, or bovine pancreatic chymotrypsin, or cysteine proteases such as human liver cathepsin B.

[0967] Of particular interest in some embodiments as NS3 inhibitors that inhibit HCV non-structural protein-4 (NS4) helicase activity and that do not show significant inhibitory activity against other serine proteases such as human leukocyte elastase, porcine pancreatic elastase, or bovine pancreatic chymotrypsin, or cysteine proteases such as human liver cathepsin B.

NS5B Inhibitors

[0968] Suitable HCV non-structural protein-5 (NS5; RNA-dependent RNA polymerase) inhibitors include, but are not limited to, a compound as disclosed in U.S. Pat. No. 6,479,508 (Boehringer-Ingelheim); a compound as disclosed in any of International Patent Application Nos. PCT/CA02/01127, PCT/CA02/01128, and PCT/CA02/01129, all filed on Jul. 18, 2002 by Boehringer Ingelheim; a compound as disclosed in U.S. Pat. No. 6,440,985 (ViroPharma); a compound as disclosed in WO 01/47883, e.g., JTK-003 (Japan Tobacco); a dinucleotide analog as disclosed in Zhong et al. (2003) Antimicrob. Agents Chemother. 47:2674-2681; a benzothiadiazine compound as disclosed in Dhanak et al. (2002) J Biol Chem. 277(41):38322-7; an NS5B inhibitor as disclosed in WO 02/100846 A1 or WO 02/100851 A2 (both Shire); anNS5B inhibitor as disclosed in WO 01/85172 A1 or WO 02/098424 A1 (both Glaxo SmithKline); an NS5B inhibitor as disclosed in WO 00/06529 or WO 02/06246 A1 (both Merck); an NS5B inhibitor as disclosed in WO 03/000254 (Japan Tobacco); an NS5B inhibitor as disclosed in EP 1 256,628 A2 (Agouron); JTK-002 (Japan Tobacco); JTK-109 (Japan Tobacco); and the like.

[0969] Of particular interest in many embodiments are NS5 inhibitors that are specific NS5 inhibitors, e.g., NS5 inhibitors that inhibit NS5 RNA-dependent RNA polymerase and that lack significant inhibitory effects toward other RNA dependent RNA polymerases and toward DNA dependent RNA polymerases.

Alpha-Glucosidase Inhibitors

[0970] Alpha-glucosidase inhibitors are a class of oral medications for type 2 diabetes that decrease the absorption of carbohydrates from the intestine, resulting in a slower rise in blood glucose throughout the day, especially following meals, in type 2 diabetic patients. Alpha-glucosidase inhibitors suitable for use in a subject combination therapy include, but are not limited to, n-(n-nonyl)-deoxygalactonojirimycin (n,n-DGJ); N-nonyl-deoxynojirimycin (N-nonyl-DNJ); N-butyl-deoxynojirimycin (NB-DNJ); 1-deoxynojirimycin (DNM); perbutylated-N-butyl-1-deoxynojiromycin (p-N-butyl-DNJ); and 6-O-butanoyl castanospermine; and the like.

Additional Antiviral Therapeutic Agents

[0971] Additional antiviral therapeutic agents that can be administered in a subject combination therapy include, but are not limited to, alpha-glucosidase inhibitors; inhibitors of inosine monophosphate dehydrogenase (IMPDH); ribozymes that are complementary to viral nucleotide sequences; antisense RNA inhibitors; and the like.

Alpha-glucosidase Inhibitors

[0972] Alpha-glucosidase inhibitors are a class of oral medications for type 2 diabetes that decrease the absorption of carbohydrates from the intestine, resulting in a slower rise in blood glucose throughout the day, especially following meals, in type 2 diabetic patients. Alpha-glucosidase inhibitors suitable for use in a subject combination therapy include, but are not limited to, n-(n-nonyl)-deoxygalactonojirimycin (n,n-DGJ); N-nonyl-deoxynojirimycin (N-nonyl-DNJ); N-butyl-deoxynojirimycin (NB-DNJ); 1-deoxynojirimycin (DNM); perbutylated-N-butyl-1-deoxynoj iromycin (p-N-butyl-DNJ); and 6-O-butanoyl castanospermine; and the like.

IMPDH Inhibitors

[0973] IMPDH inhibitors that are suitable for use in a subject combination therapy include, but are not limited to, VX-497 ((S)-N-3-[3-(3-methoxy-4-oxazol-5-yl-phenyl)-ureido]-benzyl-carbamic acid tetrahydrofuran-3-yl-ester); Vertex Pharmaceuticals; see, e.g., Markland et al. (2000) Antimicrob. Agents Chemother. 44:859-866); ribavirin; levovirin (Ribapharm; see, e.g., Watson (2002) Curr Opin Investig Drugs 3(5):680-3); viramidine (Ribapharm); and the like.

Ribozyme and Antisense

[0974] Ribozyme and antisense antiviral agents that are suitable for use in a subject combination therapy include, but are not limited to, ISIS 14803 (ISIS Pharmaceuticals/Elan Corporation; see, e.g., Witherell (2001) Curr Opin Investig Drugs. 2(11):1523-9); Heptazyme™; and the like.

Side Effect Management Agents

[0975] In some embodiments, a subject therapy comprises administering a palliative agent (e.g., an agent that reduces patient discomfort caused by a therapeutic agent), or other agent for the avoidance, treatment, or reduction of a side effect of a therapeutic agent. Such agents are also referred to as “side effect management agents.”

[0976] Suitable side effect management agents include agents that are effective in pain management; agents that ameliorate gastrointestinal discomfort; analgesics, anti-inflammatories, antipsychotics, antineurotics, anxiolytics, and hematopoietic agents. In addition, the invention contemplates the use of any compound for palliative care of patients suffering from pain or any other side effect in the course of treatment with a subject therapy. Exemplary palliative agents include acetaminophen, ibuprofen, and other NSAIDs, H2 blockers, and antacids.

[0977] Analgesics that can be used to alleviate pain in the methods of the invention include non-narcotic analgesics such as non-steroidal anti-inflammatory drugs (NSAIDs) acetaminophen, salicylate, acetyl-salicylic acid (aspirin, diflunisal), ibuprofen, Motrin, Naprosyn, Nalfon, and Trilisate, indomethacin, glucametacine, acemetacin, sulindac, naproxen, piroxicam, diclofenac, benoxaprofen, ketoprofen, oxaprozin, etodolac, ketorolac tromethamine, ketorolac, nabumetone, and the like, and mixtures of two or more of the foregoing.

[0978] Other suitable analgesics include fentanyl, buprenorphine, codeine sulfate, morphine hydrochloride, codeine, hydromorphone (Dilaudid), levorphanol (Levo-Dromoran), methadone (Dolophine), morphine, oxycodone (in Percodan), and oxymorphone (Numorphan). Also suitable for use are benzodiazepines including, but not limited to, flurazepam (Dalmane), diazepam (Valium), and Versed, and the like.

Anti-inflammatory Agents

[0979] Suitable anti-inflammatory agents include, but are not limited to, steroidal anti-inflammatory agents, and non-steroidal anti-inflammatory agents.

[0980] Suitable steroidal anti-inflammatory agents include, but are not limited to, hydrocortisone, hydroxyltriamcinolone, alpha-methyl dexamethasone, dexamethasone-phosphate, beclomethasone dipropionate, clobetasol valerate, desonide, desoxymethasone, desoxycorticosterone acetate, dexamethasone, dichlorisone, diflorasone diacetate, diflucortolone valerate, fluadrenolone, fluclorolone acetonide, fludrocortisone, flumethasone pivalate, fluosinolone acetonide, fluocinonide, flucortine butylester, fluocortolone, fluprednidene (fluprednylidene) acetate, flurandrenolone, halcinonide, hydrocortisone acetate, hydrocortisone butyrate, methylprednisolone, triamcinolone acetonide, conisone, cortodoxone, flucetonide, fludrocortisone, difluorosone diacetate, fluradrenolone acetonide, medrysone, amcinafel, amcinafide, betamethasone and the balance of its esters, chloroprednisone, chlorprednisone acetate, clocortelone, clescinolone, dichlorisone, difluprednate, flucloronide, flunisolide, fluoromethalone, fluperolone, fluprednisolone, hydrocortisone valerate, hydrocortisone cyclopentylpropionate, hydrocortamate, meprednisone, paramethasone, prednisolone, prednisone, beclomethasone dipropionate, triamcinolone, and mixtures of two or more of the foregoing.

[0981] Suitable non-steroidal anti-inflammatory agents, include, but are not limited to, 1) the oxicams, such as piroxicam, isoxicam, tenoxicam, and sudoxicam; 2) the salicylates, such as aspirin, disalcid, benorylate, trilisate, safapryn, solprin, diflunisal, and fendosal; 3) the acetic acid derivatives, such as diclofenac, fenclofenac, indomethacin, sulindac, tolmetin, isoxepac, furofenac, tiopinac, zidometacin, acematacin, fentiazac, zomepiract, clidanac, oxepinac, and felbinac; 4) the fenamates, such as mefenamic, meclofenamic, flufenamic, niflumic, and tolfenamic acids; 5) the propionic acid derivatives, such as ibuprofen, naproxen, benoxaprofen, flurbiprofen, ketoprofen, fenoprofen, fenbufen, indoprofen, pirprofen, carprofen, oxaprozin, pranoprofen, miroprofen, tioxaprofen, suprofen, alminoprofen, and tiaprofenic; and 6) the pyrazoles, such as phenylbutazone, oxyphenbutazone, feprazone, azapropazone, and trimethazone, mixtures of these non-steroidal anti-inflammatory agents may also be employed, as well as the pharmaceutically-acceptable salts and esters of these agents.

[0982] Suitable anti-inflammatory agents include, but are not limited to, Alclofenac; Alclometasone Dipropionate; Algestone Acetonide; Alpha Amylase; Amcinafal; Amcinafide; Amfenac Sodium; Amiprilose Hydrochloride; Anakinra; Anirolac; Anitrazafen; Apazone; Balsalazide Disodium; Bendazac; Benoxaprofen; Benzydamine Hydrochloride; Bromelains; Broperamole; Budesonide; Carprofen; Cicloprofen; Cintazone; Cliprofen; Clobetasol Propionate; Clobetasone Butyrate; Clopirac; Cloticasone Propionate; Cormethasone Acetate; Cortodoxone; Deflazacort; Desonide; Desoximetasone; Dexamethasone Dipropionate; Diclofenac Potassium; Diclofenac Sodium; Diflorasone Diacetate; -Diflumidone Sodium; Diflunisal; Difluprednate; Diftalone; Dimethyl Sulfoxide; Drocinonide; Endrysone; Enlimomab Enolicam Sodium; Epirizole; Etodolac; Etofenamate; Felbinac; Fenamole; Fenbufen; Fenclofenac; Fenclorac; Fendosal; Fenpipalone; Fentiazac; Flazalone; Fluazacort; Flufenamic Acid; Flumizole; Flunisolide Acetate; Flunixin; Flunixin Meglumine; Fluocortin Butyl; Fluorometholone Acetate; Fluquazone; Flurbiprofen; Fluretofen; Fluticasone Propionate; Furaprofen; Furobufen; Halcinonide; Halobetasol Propionate; Halopredone Acetate; Ibufenac; Ibuprofen; Ibuprofen Aluminum; Ibuprofen Piconol; Ilonidap; Indomethacin; Indomethacin Sodium; Indoprofen; Indoxole; Intrazole; Isoflupredone Acetate; Isoxepac; Isoxicam; Ketoprofen; Lofemizole Hydrochloride; Lomoxicam; Loteprednol Etabonate; Meclofenamate Sodium; Meclofenamic Acid; Meclorisone Dibutyrate; Mefenamic Acid; Mesalamine; Meseclazone; Methylprednisolone Suleptanate; Morniflumate; Nabumetone; Naproxen; Naproxen Sodium; Naproxol; Nimazone; Olsalazine Sodium; Orgotein; Orpanoxin; Oxaprozin; Oxyphenbutazone; Paranyline Hydrochloride; Pentosan Polysulfate Sodium; Phenbutazone Sodium Glycerate; Pirfenidone; Piroxicam; Piroxicam Cinnamate; Piroxicam Olamine; Pirprofen; Prednazate; Prifelone; Prodolic Acid; Proquazone; Proxazole; Proxazole Citrate; Rimexolone; Romazarit; Salcolex; Salnacedin; Salsalate; Sanguinarium Chloride; Seclazone; Sermetacin; Sudoxicam; Sulindac; Suprofen; Talmetacin; Talniflumate; Talosalate; Tebufelone; Tenidap; Tenidap Sodium; Tenoxicam; Tesicam; Tesimide; Tetrydamine; Tiopinac; Tixocortol Pivalate; Tolmetin; Tolmetin Sodium; Triclonide; Triflumidate; Zidometacin; Zomepirac Sodium.

[0983] Antipsychotic and antineurotic drugs that can be used to alleviate psychiatric side effects in the methods of the invention include any and all selective serotonin receptor inhibitors (SSRIs) and other anti-depressants, anxiolytics (e.g. alprazolam), etc. Anti-depressants include, but are not limited to, serotonin reuptake inhibitors such as Celexa®, Desyrel®, Effexor®, Luvox®, Paxil®, Prozac®, Zoloft®, and Serzone®; tricyclics such as Adapin®, Anafrinil®, Elavil®, Janimmine®, Ludiomil®, Pamelor®, Tofranil®, Vivactil®, Sinequan®, and Surmontil®; monoamine oxidase inhibitors such as Eldepryl®, Marplan®, Nardil®, and Parnate®. Anti-anxiety agents include, but are not limited to, azaspirones such as BuSpar®, benzodiazepines such as Ativan®, Librium®, Tranxene®, Centrax®, Klonopin®, Paxipam®, Serax®, Valium®, and Xanax®; and beta-blockers such as Inderal® and Tenormin®.

[0984] Agents that reduce gastrointestinal discomfort such as nausea, diarrhea, gastrointestinal cramping, and the like are suitable palliative agents for use in a subject combination therapy. Suitable agents include, but are not limited to, antiemetics, anti-diarrheal agents, H2 blockers, antacids, and the like.

[0985] Suitable H2 blockers (histamine type 2 receptor antagonists) that are suitable for use as a palliative agent in a subject therapy include, but are not limited to, Cimetidine (e.g., Tagamet, Peptol, Nu-cimet, apo-cimetidine, non-cimetidine); Ranitidine (e.g., Zantac, Nu-ranit, Novo-randine, and apo-ranitidine); and Famotidine (Pepcid, Apo-Famotidine, and Novo-Famotidine).

[0986] Suitable antacids include, but are not limited to, aluminum and magnesium hydroxide (Maalox®, Mylanta®; aluminum carbonate gel (Basajel®; aluminum hydroxide (Amphojel®, AltemaGEL®; calcium carbonate (Tums®, Titralac®); magnesium hydroxide; and sodium bicarbonate.

[0987] Antiemetics include, but are not limited to, 5-hydroxytryptophan-3 (5HT3) inhibitors; corticosteroids such as dexamethasone and methylprednisolone; Marinol® (dronabinol); prochlorperazine; benzodiazepines; promethazine; and metocloprarnide cisapride; Alosetron Hydrochloride; Batanopride Hydrochloride; Bemesetron; Benzquinamide; Chlorpromazine; Chlorpromazine Hydrochloride; Clebopride; Cyclizine Hydrochloride; Dimenhydrinate; Diphenidol; Diphenidol Hydrochloride; Diphenidol Pamoate; Dolasetron Mesylate; Domperidone; Dronabinol; Fludorex; Flumeridone; Galdansetron Hydrochloride; Granisetron; Granisetron Hydrochloride; Lurosetron Mesylate; Meclizine Hydrochloride; Metoclopramide Hydrochloride; Metopimazine; Ondansetron Hydrochloride; Pancopride; Prochlorperazine; Prochlorperazine Edisylate; Prochlorperazine Maleate; Promethazine Hydrochloride; Thiethylperazine; Thiethylperazine Malate; Thiethylperazine Maleate; Trimethobenzamide Hydrochloride; Zacopride Hydrochloride.

[0988] Anti-diarrheal agents include, but are not limited to, Rolgamidine, Diphenoxylate hydrochloride (Lomotil), Metronidazole (Flagyl), Methylprednisolone (Medrol), Sulfasalazine (Azulfidine), and the like.

[0989] Suitable hematopoietic agents that can be used to prevent or restore depressed blood cell populations in the methods of the invention include erythropoietins, such as EPOGEN™ epoetin-alfa, granulocyte colony stimulating factors (G-CSFs), such as NEUPOGEN™ filgrastim, granulocyte-macrophage colony stimulating factors (GM-CSFs), thrombopoietins, etc.

Treatment Methods

[0990] The present invention provides a method of treating a disease, disorder, or condition in a patient. In one aspect, a subject treatment method utilizes an oral pharmaceutical formulation comprising a known hyperglycosylated, protease-resistant polypeptide variant of a parent protein therapeutic, the known protease-resistant polypeptide variant comprising at least one mutated protease cleavage site in place of a native protease cleavage site that is present in the parent protein therapeutic; and comprising: i) a carbohydrate moiety covalently attached to at least one non-native glycosylation site that is not present in the parent protein therapeutic; or ii) a carbohydrate moiety covalently attached to at least one native glycosylation site that is present but is not glycosylated in the parent protein therapeutic. The oral pharmaceutical composition is administered orally to the patient in an amount whereby the patient receives a first number of moles of the known hyperglycosylated, protease-resistant polypeptide variant at a first dosing interval. The first number of moles of the known hyperglycosylated, protease-resistant variant is greater than a second number of moles of the parent protein therapeutic in a parenteral pharmaceutical composition. The parenteral pharmaceutical composition is an immediate release formulation suitable for subcutaneous bolus injection, and the parent polypeptide is proven to be effective in the treatment of the disease, disorder or condition in the patient when administered to the patient by subcutaneous bolus injection in an amount of the parenteral pharmaceutical composition whereby the patient receives the second number of moles of the parent protein therapeutic at a second dosing interval. In a subject method of treating a disease in a patient, the method comprises administering orally to the patient the oral pharmaceutical composition in an amount whereby the patient receives the first number of moles of the known hyperglycosylated, protease-resistant polypeptide variant at the first dosing interval that is the same as or shorter than the second dosing interval.

[0991] Thus, the known hyperglycosylated, protease-resistant polypeptide variant is effective in the treatment of the disease, disorder or condition in a patient when administered to the patient orally at a dosage of the first number of moles at the first dosing interval for a desired treatment duration.

[0992] In another aspect, the invention provides a modification of the above-described method of treating a disease, disorder or condition in a patient, where the oral pharmaceutical composition comprising the known hyperglycosylated, protease-resistant polypeptide variant is administered orally to the patient in a first dose at a first dosing frequency, where the parenteral pharmaceutical composition is proven to be effective in the treatment of the disease in a patient when administered to the patient by subcutaneous bolus injection of a second dose of the parent protein therapeutic at a second dosing frequency, where the first dose in moles of the known hyperglycosylated, protease-resistant polypeptide variant per kilogram of patient body weight is greater than the second dose in moles of the parent protein therapeutic per kilogram of patient body weight when the first and second doses are calculated for the same patient body weight, and where upon oral administration of the first dose of the known hyperglycosylated, protease-resistant polypeptide variant to the patient, all of the known hyperglycosylated, protease-resistant polypeptide variant in the first dose is released in a period of time no greater than the period of time between doses in the second dosing frequency. In some embodiments, the parenteral pharmaceutical composition is proven to be effective in the treatment of the disease, disorder or condition in the patient when administered to the patient in a weight-based dose of the parent protein therapeutic at the second dosing interval, i.e., the second dose is a weight-based dose and the parenteral pharmaceutical composition is in a form that allows weight-based dosing. In some of the foregoing embodiments, the first dose is a weight-based dose of the known hyperglycosylated, protease-resistant polypeptide variant and the oral pharmaceutical composition is in a form that allows weight-based dosing.

[0993] In another aspect, the invention provides a modification of the above-described method of treating a disease, disorder or condition in a patient, where the oral pharmaceutical composition comprising the known hyperglycosylated, protease-resistant polypeptide variant is administered orally to the patient in a first dose at a first dosing frequency, where the parenteral pharmaceutical composition is proven to be effective in the treatment of the disease, disorder or condition in a patient when administered to the patient by subcutaneous bolus injection of a second dose of the parent protein therapeutic at a second dosing frequency, where the first dose in moles of the known hyperglycosylated, protease-resistant polypeptide variant per kilogram of patient body weight is greater than the second dose in moles of the parent protein therapeutic per kilogram of patient body weight when the first and second doses are calculated for the same patient body weight, and where the time period between doses in the first dosing frequency is the same as or shorter than the time period between doses in the second dosing frequency. In some embodiments, the parenteral pharmaceutical composition is proven to be effective in the treatment of the disease, disorder or condition in the patient when administered to the patient in a weight-based dose of the parent protein therapeutic at the second dosing interval, i.e., the second dose is a weight-based dose and the parenteral pharmaceutical composition is in a form that allows weight-based dosing. In some of the foregoing embodiments, the first dose is a weight-based dose and the oral pharmaceutical composition is in a form that allows weight-based dosing.

[0994] The choice of hyperglycosylated, protease-resistant polypeptide variant will depend in part on the disease, disorder, or condition being treated. As noted above, the desired hyperglycosylated, protease-resistant polypeptide variant is effective to treat the disease, disorder, or condition that is treatable with a parent protein therapeutic. The following are non-limiting examples.

Treatment Methods Using IFN-α

[0995] In one aspect, where the known hyperglycosylated, protease-resistant polypeptide variant is a known hyperglycosylated, protease-resistant IFN-α, a subject method provides for administering to an individual in need thereof a therapeutically effective amount of a known hyperglycosylated, protease-resistant IFN-αin a method of treating a viral infection, e.g., a hepatitis C virus (HCV) infection. In some embodiments, the method generally comprises orally administering a known hyperglycosylated, protease-resistant polypeptide variant of a parent IFN-α2 to an individual in need thereof in a first dose at a first dosing frequency that is at least as frequent, or more frequent, than a second dosing frequency proven to be effective in a regimen for treatment of HCV infection comprising administering to an individual in need thereof a parenteral formulation of the parent IFN-α2 in a second dose at the second dosing frequency, where the first dose comprises a first number of moles of the known hyperglycosylated, protease-resistant polypeptide variant that is greater than a second number of moles of the parent IFN-α2 in the second dose.

[0996] In one non-limiting example, the parent IFN-α2 is proven to be effective in the treatment of HCV infection in a method comprising administering to a patient in need thereof 3 million units (or 15 micrograms) of IFN-α2 by subcutaneous bolus injection three times per week for 48 weeks. In some of these embodiments, the known protease-resistant or protease-resistant, hyperglycosylated polypeptide variant of the parent IFN-α2 can be, e.g., selected from the group of the [D99N]IFN-α2a, [D99N, D105N]IFN-α2a, [D99N]IFN-α2b, and [D99N, D105N]IFN-α2b glycopeptide variants (where the amino acid numbering is as set forth in FIG. 24); where the variant further comprises one or more single amino acid replacements at one or more target positions corresponding to any of amino acid positions: 41, 58, 78, 107, 117, 125, 133 and 159 (where the amino acid numbering is as set forth in FIG. 2), or any of the mutations depicted in Table 1, such that the variant comprises at least one mutated protease cleavage site in place of a native protease cleavage site found in the parent IFN-α2. The variant is administered orally to the patient in the first dose containing the first number of moles of the variant at the first dosing frequency, where the first number of moles is greater than the number of moles of the parent IFN-α2 in 3 million units (or 15 micrograms) of the parent IFN-α2, and where the first dosing frequency is at least three times per week. Alternatively, the first dosing frequency is four times per week, five times per week, six times per week, once per day, twice per day, or three times per day.

[0997] In some embodiments, the invention provides any of the foregoing methods of treating HCV infection with a known protease-resistant or protease-resistant, hyperglycosylated polypeptide variant of IFN-α2, in which the known protease-resistant or protease-resistant, hyperglycosylated polypeptide variant comprises any of the carrier peptides described in Table 9 above in a covalent or non-covalent association with the desired polypeptide variant. In some of these embodiments, the known protease-resistant or protease-resistant, hyperglycosylated polypeptide variant comprises any such carrier peptide in a direct or indirect covalent linkage with the desired polypeptide variant, including without limitation any such carrier peptide fused to the N-terminus of the desired polypeptide variant.

[0998] In another non-limiting example, the parent IFN-α2 is proven to be effective in the treatment of HCV infection in a method comprising administering to a patient in need thereof 15 micrograms (or 8.0×10⁻¹⁰ mol.) of IFN-α2 by subcutaneous bolus injection three times per week for 48 weeks. In some of these embodiments, the known protease-resistant or protease-resistant, hyperglycosylated polypeptide variant of the parent IFN-α2 can be, e.g., selected from the group of the [D99N]IFN-α2a, [D99N, D105N]IFN-α2a, [D99N]IFN-α2b, and [D99N, D105N]IFN-α2b glycopeptide variants (where the amino acid numbering is as set forth in FIG. 24); where the variant further comprises one or more single amino acid replacements at one or more target positions corresponding to any of amino acid positions: 41, 58, 78, 107, 117, 125, 133 and 159 (where the amino acid numbering is as set forth in FIG. 2), or any of the mutations depicted in Table 1, such that the variant comprises at least one mutated protease cleavage site in place of a native protease cleavage site found in the parent IFN-α2; and the variant is administered orally to the patient in the first dose containing the first number of moles of the variant at the first dosing frequency, where the first number of moles is greater than 8.0×10⁻¹⁰ mol., or at least about 1.6×10⁻⁹ mol., or at least about 2.4×10−9 mol., or at least about 3.2×10⁻⁹ mol., or at least about 4.0×10⁻⁹ mol., or at least about 4.8×10⁻⁹ mol., or at least about 5.6×10⁻⁹ mol., or at least about 6.4×10^{31 9} mol., or at least about 7.2×10⁻⁹ mol., or at least about 8.0×10⁻⁹ mol., or at least about 8.0×10⁻⁸ mol., and where the first dosing frequency is at least three times per week. Alternatively, the first dosing frequency is four times per week, five times per week, six times per week, once per day, twice per day, or three times per day.

[0999] In another aspect, where the known protease-resistant or protease-resistant, hyperglycosylated polypeptide variant is a known protease-resistant or protease-resistant, hyperglycosylated consensus IFN-α, a subject method provides for administering to an individual in need thereof a therapeutically effective amount of the known protease-resistant or protease-resistant, hyperglycosylated consensus IFN-α in a method of treating a viral infection, e.g., a hepatitis C virus (HCV) infection. In some embodiments, the method generally comprises orally administering a known protease-resistant or protease-resistant, hyperglycosylated polypeptide variant of a parent consensus IFN-α to an individual in need thereof in a first dose and at a first dosing frequency that is at least as frequent, or more frequent, than a second dosing frequency proven to be effective in a regimen for treatment of HCV infection comprising administering to an individual in need thereof a parenteral formulation of the parent consensus IFN-α in a second dose at the second dosing frequency, where the first dose comprises a first number of moles of the known protease-resistant or protease-resistant, hyperglycosylated polypeptide variant that is greater than a second number of moles of the parent consensus IFN-α in the second dose.

[1000] In one non-limiting example, the parent interferon alfacon-1 is proven to be effective in the treatment of HCV infection in a method comprising administering to a patient in need thereof 9 million units (or 9 micrograms) of INFERGEN® interferon alfacon-1 by subcutaneous bolus injection three times per week for 48 weeks. In some of these embodiments, the known protease-resistant or protease-resistant, hyperglycosylated polypeptide variant of the parent interferon alfacon-1 can be, e.g., selected from the group of the [D99N]interferon alfacon-1, [D99N, D105N]interferon alfacon-1, [D99N, D105N, E134N]interferon alfacon-1, [D105N, E134N]interferon alfacon-1, [E134N]interferon alfacon-1, and [D99N, E134N]interferon alfacon-1 glycopeptides (where the amino acid numbering is as set forth in FIG. 24); where the glycopeptide further comprises one or more single amino acid replacements at one or more target positions corresponding to any of amino acid positions: 41, 58, 78, 107, 117, 125, 133 and 159 (where the amino acid numbering is as set forth in FIG. 9), such that the variant comprises at least one mutated protease cleavage site in place of a native protease cleavage site found in the parent consensus IFN-α; and administered orally to the patient in the first dose containing the first number of moles of the known protease-resistant or protease-resistant, hyperglycosylated polypeptide variant at the first dosing frequency, where the first number of moles is greater than the number of moles of interferon alfacon-1 in 9 million units (or 9 micrograms) of interferon alfacon-1, and where the first dosing frequency is at least three times per week. Alternatively, the first dosing frequency is four times per week, five times per week, six times per week, once per day, twice per day, or three times per day.

[1001] In another non-limiting example, the parent interferon alfacon-1 is proven to be effective in the treatment of HCV infection in a method comprising administering to a patient in need thereof 15 million units (or 15 micrograms) of INFERGEN® interferon alfacon-1 by subcutaneous bolus injection three times per week for 48 weeks. In some of these embodiments, the known protease-resistant or protease-resistant, hyperglycosylated polypeptide variant of the parent interferon alfacon-1 can be, e.g., selected from the group of the [D99N]interferon alfacon-1, [D99N, D105N]interferon alfacon-1, [D99N, D105N, E134N]interferon alfacon-1, [D105N, E134N]interferon alfacon-1, [E134N]interferon alfacon-1, and [D99N, E134N]interferon alfacon-1 glycopeptides (where the amino acid numbering is as set forth in FIG. 24); where the glycopeptide further comprises one or more single amino acid replacements at one or more target positions corresponding to any of amino acid positions: 41, 58, 78, 107, 117, 125, 133 and 159 (where the amino acid numbering is as set forth in FIG. 9), such that the variant comprises at least one mutated protease cleavage site in place of a native protease cleavage site found in the parent consensus IFN-α; and administered orally to the patient in the first dose containing the first number of moles of the known protease-resistant or protease-resistant, hyperglycosylated polypeptide variant at the first dosing frequency, where the first number of moles is greater than the number of moles of interferon alfacon-1 in 15 million units (or 15 micrograms) of interferon alfacon-1, and where the first dosing frequency is at least three times per week. Alternatively, the first dosing frequency is four times per week, five times per week, six times per week, once per day, twice per day, or three times per day.

[1002] In another non-limiting example, the parent interferon alfacon-1 is proven to be effective in the treatment of HCV infection in a method comprising administering to a patient in need thereof 9 micrograms (or 4.6×10⁻¹⁰ mol.) of interferon alfacon-1 by subcutaneous bolus injection three times per week for 48 weeks. In some of these embodiments, the known protease-resistant or protease-resistant, hyperglycosylated polypeptide variant of the parent interferon alfacon-1 can be, e.g., selected from the group of the [D99N]interferon alfacon-1, [D99N, D105N]interferon alfacon-1, [D99N, D105N, E134N]interferon alfacon-1, [D105N, E134N]interferon alfacon-1, [E134N]interferon alfacon-1, and [D99N, E134N]interferon alfacon-1 glycopeptides (where the amino acid numbering is as set forth in FIG. 24); where the glycopeptide further comprises one or more single amino acid replacements at one or more target positions corresponding to any of amino acid positions: 41, 58, 78, 107, 117, 125, 133 and 159 (where the amino acid numbering is as set forth in FIG. 9), such that the variant comprises at least one mutated protease cleavage site in place of a native protease cleavage site found in the parent consensus IFN-α; and administered orally to the patient in the first dose containing the first number of moles of the known protease-resistant or protease-resistant, hyperglycosylated polypeptide variant at the first dosing frequency, where the first number of moles is greater than 4.6×10⁻¹⁰ mol., or at least about 9.2×10⁻¹⁰ mol., or at least about 1.4×10⁻⁹ mol., or at least about 1.8×10⁻⁹ or at least about 2.3×10⁻⁹ mol., or at least about 2.8×10⁻⁹ mol., or at least about 3.2×10⁻⁹ mol., or at least about 3.7×10⁻⁹ mol., or at least about 4.1×10⁻⁹ mol., or at least about 4.6×10⁻⁹ mol., or at least about 4.6−10⁻⁸ mol., and where the first dosing frequency is at least three times per week. Alternatively, the first dosing frequency is four times per week, five times per week, six times per week, once per day, twice per day, or three times per day.

[1003] In another non-limiting example, the parent interferon alfacon-1 is proven to be effective in the treatment of HCV infection in a method comprising administering to a patient in need thereof 15 micrograms (or 7.6×10⁻¹⁰ mol.) of interferon alfacon-1 by subcutaneous bolus injection three times per week for 48 weeks. In some of these embodiments, the known protease-resistant or protease-resistant, hyperglycosylated polypeptide variant of the parent interferon alfacon-1 can be, e.g., selected from the group of the [D99N]interferon alfacon-1, [D99N, D105N]interferon alfacon-1, [D99N, D105N, E 134N]interferon alfacon-1, [D105N, E134N]interferon alfacon-1, [E134N]interferon alfacon-1, and [D99N, E134N]interferon alfacon-1 glycopeptides, where the glycopeptide further comprises one or more single amino acid replacements at one or more target positions corresponding to any of amino acid positions: 41, 58, 78, 107, 117, 125, 133 and 159, such that the variant comprises at least one mutated protease cleavage site in place of a native protease cleavage site found in the parent consensus IFN-α; and administered orally to the patient in the first dose containing the first number of moles of the known protease-resistant or protease-resistant, hyperglycosylated polypeptide variant at the first dosing frequency, where the first number of moles is greater than 7.6×10⁻¹⁰ mol., or at least about 1.5×10⁻⁹ mol., or at least about 2.3×10⁻⁹ mol., or at least about 3.0×10⁻⁹ mol., or at least about 3.8×10⁻⁹ mol., or at least about 4.6×10⁻⁹ mol., or at least about 5.3×10⁻⁹ mol., or at least about 6.1×10⁻⁹ mol., or at least about 6.8×10⁻⁹ mol., or at least about 7.6×10⁻⁹ mol., or at least about 7.6×10⁻⁸ mol., and where the first dosing frequency is at least three times per week. Alternatively, the first dosing frequency is four times per week, five times per week, six times per week, once per day, twice per day, or three times per day.

[1004] In another non-limiting example, the parent interferon alfacon-1 is proven to be effective in the treatment of HCV infection in a method comprising administering to a patient in need thereof 9 micrograms (or 4.5×10⁻⁸ mol.) of interferon alfacon-1 by subcutaneous bolus injection once per day for 48 weeks. In some of these embodiments, the known protease-resistant or protease-resistant, hyperglycosylated polypeptide variant of the parent interferon alfacon-1 can be, e.g., selected from the group of the [D99N]interferon alfacon-1, [D99N, D105N]interferon alfacon-1, [D99N, D105N, E134N]interferon alfacon-1, [D105N, E134N]interferon alfacon-1, [E134N]interferon alfacon-1, and [D99N, E134N]interferon alfacon-1 glycopeptides, where the glycopeptide further comprises one or more single amino acid replacements at one or more target positions corresponding to any of amino acid positions: 41, 58, 78, 107, 117, 125, 133 and 159, such that the variant comprises at least one mutated protease cleavage site in place of a native protease cleavage site found in the parent consensus IFN-α; and administered orally to the patient in the first dose containing the first number of moles of the known protease-resistant or protease-resistant, hyperglycosylated polypeptide variant at the first dosing frequency, where the first number of moles is greater than 4.6×10⁻¹⁰ mol., or at least about 9.2×10⁻¹⁰ mol., or at least about 1.4×10⁻⁹ mol., or at least about 1.8×10⁹ mol., or at least about 2.3×10⁻⁹ mol., or at least about 2.8×10⁻⁹ mol., or at least about 3.2×10^{×9} mol., or at least about 3.7×10⁻⁹ mol., or at least about 4.1×10⁻⁹ mol., or at least about 4.6×10⁻⁹ mol., or at least about 4.6×10⁻⁸ mol., and where the first dosing frequency is at least once per day. Alternatively, the first dosing frequency is twice per day or three times per day.

[1005] In another non-limiting example, the parent interferon alfacon-1 is proven to be effective in the treatment of HCV infection in a method comprising administering to a patient in need thereof 15 micrograms (or 7.5×10⁻⁸ mol.) of interferon alfacon-1 by subcutaneous bolus injection once per day for 48 weeks. In some of these embodiments, the known protease-resistant or protease-resistant, hyperglycosylated polypeptide variant of the parent interferon alfacon-1 can be, e.g., selected from the group of the [D99N]interferon alfacon-1, [D99N, D105N]interferon alfacon-1, [D99N, D105N, E134N]interferon alfacon-1, [D105N, E134N]interferon alfacon-1, [E134N]interferon alfacon-1, and [D99N, E134N]interferon alfacon-1 glycopeptides, where the glycopeptide further comprises one or more single amino acid replacements at one or more target positions corresponding to any of amino acid positions: 41, 58, 78, 107, 117, 125, 133 and 159, such that the variant comprises at least one mutated protease cleavage site in place of a native protease cleavage site found in the parent consensus IFN-α; and administered orally to the patient in the first dose containing the first number of moles of the known protease-resistant or protease-resistant, hyperglycosylated polypeptide variant at the first dosing frequency, where the first number of moles is greater than 7.6×10⁻¹⁰ mol., or at least about 1.5×10⁻⁹ mol., or at least about 2.3×10⁻⁹ mol., or at least about 3.0×10⁻⁹ mol., or at least about 3.8×10⁻⁹ mol., or at least about 4.6×10⁻⁹ mol., or at least about 5.3×10⁻⁹ mol., or at least about 6.1×10⁻⁹ mol., or at least about 6.8×10⁻⁹ mol., or at least about 7.6×10⁻⁹ mol., or at least about 7.6×10⁻⁸ mol., and where the first dosing frequency is at least once per day. Alternatively, the first dosing frequency is twice per day or three times per day.

[1006] In some embodiments, the invention provides any of the foregoing methods of treating HCV infection with a known protease-resistant or protease-resistant, hyperglycosylated polypeptide variant of a consensus IFN-α, in which the known protease-resistant or protease-resistant, hyperglycosylated polypeptide variant comprises any of the carrier peptides described in Table 9 above in a covalent or non-covalent association with the desired polypeptide variant. In some of these embodiments, the known protease-resistant or protease-resistant, hyperglycosylated polypeptide variant comprises any such carrier peptide in a direct or indirect covalent linkage with the desired polypeptide variant, including without limitation any such carrier peptide fused to the N-terminus of the desired polypeptide variant.

Treatment Methods Using IFN-γ

[1007] In another aspect, where the known protease-resistant or protease-resistant, hyperglycosylated polypeptide variant is a hyperglycosylated IFN-γ, a subject method provides for administering to an individual in need thereof a therapeutically effective amount of a known protease-resistant or protease-resistant, hyperglycosylated IFN-γ in a method of treating a viral infection, e.g., an HCV infection. In some embodiments, the method generally comprises orally administering a known protease-resistant or protease-resistant, hyperglycosylated polypeptide variant of a parent IFN-γ to an individual in need thereof in a first dose at a first dosing frequency that is at least as frequent, or more frequent, than a second dosing frequency proven to be effective in a regimen for treatment of HCV infection comprising administering to an individual in need thereof a therapeutically effective amount of an IFN-α and co-administering to the individual a parenteral formulation of the parent IFN-γ in a second dose at the second dosing frequency, where the first dose comprises a first number of moles of the known protease-resistant or protease-resistant, hyperglycosylated polypeptide variant that is greater than a second number of moles of the parent IFN-γ in the second dose.

[1008] In one non-limiting example, the parent IFN-γis IFN-γ1b and is proven to be effective in the treatment of HCV infection in a method comprising administering to a patient in need thereof a therapeutically effective amount of an IFN-αand co-administering to the patient 100 micrograms (6.0×10⁻⁹ mol.) of IFN-γ1b by subcutaneous bolus injection three times per week for 48 weeks. In some of these embodiments, the known protease-resistant or protease-resistant, hyperglycosylated polypeptide variant of the parent IFN-γ1b can be, e.g., selected from the group of the [S99T]IFN-γ, [E38N]IFN-γ, [E38N, S40T]IFN-γ, [E38N, S99T]IFN-γ, and [E38N, S40T, S99T]IFN-γ glycopeptides, where the glycopeptide variant further comprises one or more of the amino acid replacements set forth in Table 3 (IFN-γ), such that the glycopeptide variant comprises at least one mutated protease cleavage site in place of a native protease cleavage site found in the parent IFN-γ polypeptide; and administered orally to the patient in the first dose containing the first number of moles of the known protease-resistant or protease-resistant, hyperglycosylated polypeptide variant at the first dosing frequency, where the first number of moles is greater than the number of moles of IFN-γ1b in 100 micrograms (6.0×10⁻⁹ mol.) of IFN-γ1b, and where the first dosing frequency is at least three times per week. Alternatively, the first dosing frequency is four times per week, five times per week, six times per week, once per day, twice per day, or three times per day.

[1009] In another non-limiting example, the parent IFN-γ is IFN-γ1b and is proven to be effective in the treatment of HCV infection in a method comprising administering to a patient in need thereof a therapeutically effective amount of an IFN-αand co-administering to the patient 50 micrograms (3.0×10⁻⁹ mol.) of IFN-γ1b by subcutaneous bolus injection three times per week for 48 weeks. In some of these embodiments, the known protease-resistant or protease-resistant, hyperglycosylated polypeptide variant of the parent IFN-γ1b can be, e.g., selected from the group of the [S99T]IFN-γ, [E38N]IFN-γ, [E38N, S40T]IFN-γ, [E38N, S99T]IFN-γ, and [E38N, S40T, S99T]IFN-γ, glycopeptides, where the glycopeptide variant further comprises one or more of the amino acid replacements set forth in Table 3 (IFN-γ), such that the glycopeptide variant comprises at least one mutated protease cleavage site in place of a native protease cleavage site found in the parent IFN-γ polypeptide; and administered orally to the patient in the first dose containing the first number of moles of the known protease-resistant or protease-resistant, hyperglycosylated polypeptide variant at the first dosing frequency, where the first number of moles is greater than the number of moles of IFN-γ1b in 50 micrograms (3.0×10⁻⁹ mol.) of IFN-γ1b, and where the first dosing frequency is at least three times per week. Alternatively, the first dosing frequency is four times per week, five times per week, six times per week, once per day, twice per day, or three times per day.

[1010] In another non-limiting example, the parent IFN-γ is IFN-γ1b and is proven to be effective in the treatment of HCV infection in a method comprising administering to a patient in need thereof a therapeutically effective amount of an IFN-α and co-administering to the patient 100 micrograms (6.0×10⁻⁹ mol.) of IFN-γ1b by subcutaneous bolus injection three times per week for 48 weeks. In some of these embodiments, the known protease-resistant or protease-resistant, hyperglycosylated polypeptide variant of the parent IFN-γ1b can be, e.g., selected from the group of the [S99T]IFN-γ, [E38N]IFN-γ, [E38N, S40T]IFN-γ, [E38N, S99T]IFN-γ, and [E38N, S40T, S99T]IFN-γ glycopeptides, where the glycopeptide variant further comprises one or more of the amino acid replacements set forth in Table 3 (IFN-γ), such that the glycopeptide variant comprises at least one mutated protease cleavage site in place of a native protease cleavage site found in the parent IFN-γ polypeptide; and administered orally to the patient in the first dose containing the first number of moles of the known protease-resistant or protease-resistant, hyperglycosylated polypeptide variant at the first dosing frequency, where the first number of moles is greater than 6.0×10⁻⁹ mol., or at least about 1.2×10⁻⁸ mol., or at least about 1.8×10⁻⁸ mol., or at least about 2.4×10⁻⁸ mol., or at least about 3.0×10⁻⁸ mol., or at least about 3.6×10⁻⁸ mol., or at least about 4.2×10⁻⁸ mol., or at least about 4.8×10⁻⁸ mol., or at least about 5.4×10⁻⁸ mol., or at least about 6.0×10⁻⁸ mol., or at least about 6.0×10⁻⁷ mol., and where the first dosing frequency is at least three times per week. Alternatively, the first dosing frequency is four times per week, five times per week, six times per week, once per day, twice per day, or three times per day.

[1011] In another non-limiting example, the parent IFN-γ is IFN-γ1b and is proven to be effective in the treatment of HCV infection in a method comprising administering to a patient in need thereof a therapeutically effective amount of an IFN-αand co-administering to the patient 50 micrograms (3.0×10⁻⁹ mol.) of IFN-γ1b by subcutaneous bolus injection three times per week for 48 weeks. In some of these embodiments, the known protease-resistant or protease-resistant, hyperglycosylated polypeptide variant of the parent IFN-γ1b can be, e.g., selected from the group of the [S99T]IFN-γ, [E38N]IFN-γ, [E38N, S40T]IFN-γ, [E38N, S99T]IFN-γ, and [E38N, S40T, S99T]IFN-γ glycopeptides, where the glycopeptide variant further comprises one or more of the amino acid replacements set forth in Table 3 (IFN-γ), such that the glycopeptide variant comprises at least one mutated protease cleavage site in place of a native protease cleavage site found in the parent IFN-γ polypeptide; and administered orally to the patient in the first dose containing the first number of moles of the known protease-resistant or protease-resistant, hyperglycosylated polypeptide variant at the first dosing frequency, where the first number of moles is greater than 3.0×10⁻⁹ mol., or at least about 6.0×10⁻⁹ mol., or at least about 9.0×10⁻⁹ mol., or at least about 1.2×10⁻⁸ mol., or at least about 1.5×10⁻⁸ mol., or at least about 1.8×10⁻⁸ mol., or at least about 2.1×10⁻⁸ mol., or at least about 2.4×10⁻⁸ mol., or at least about 2.7×10⁻⁸ mol., or least about 3.0×10⁻⁸ mol., or at least about 3.0×10⁻⁷ mol., and where the first dosing frequency is at least three times per week. Alternatively, the first dosing frequency is four times per week, five times per week, six times per week, once per day, twice per day, or three times per day.

[1012] In some embodiments, the invention provides any of the foregoing methods of treating HCV infection with a known protease-resistant or protease-resistant, hyperglycosylated polypeptide variant of a IFN-γ, in which the known protease-resistant or protease-resistant, hyperglycosylated polypeptide variant comprises any of the carrier peptides described in Table 9 above in a covalent or non-covalent association with the desired polypeptide variant. In some of these embodiments, the known protease-resistant or protease-resistant, hyperglycosylated polypeptide variant comprises any such carrier peptide in a direct or indirect covalent linkage with the desired polypeptide variant, including without limitation any such carrier peptide fused to the N-terminus of the desired polypeptide variant.

[1013] Therapeutically effective amounts of IFN-α suitable for use in the present methods of treating HCV infection with IFN-α and IFN-γ combination therapy are provided in the methods for treating HCV infection with IFN-α therapy described under the heading “Treatment Methods Using IFN-α” above. In addition, therapeutically effective amounts of IFN-α suitable for use in the present methods of treating HCV infection with IFN-α and IFN-γ combination therapy are provided in the methods for treating HCV infection with IFN-α and IFN-γ combination therapy described in WO 03/030613.

[1014] In another aspect, where the known protease-resistant or protease-resistant, hyperglycosylated polypeptide variant is a hyperglycosylated IFN-γ, a subject method provides for administering to an individual in need thereof a therapeutically effective amount of a known protease-resistant or protease-resistant, hyperglycosylated IFN-γ in a method of treating a fibrotic disorder, e.g., a pulmonary fibrotic disorder or a liver fibrotic disorder. In some embodiments, the method generally comprises orally administering a known protease-resistant or protease-resistant, hyperglycosylated polypeptide variant of a parent IFN-γ to an individual in need thereof in a first dose at a first dosing frequency that is at least as frequent, or more frequent, than a second dosing frequency proven to be effective in a regimen for treatment of the fibrotic disorder comprising administering to an individual in need thereof a parenteral pharmaceutical formulation of the parent IFN-γ in a second dose at the second dosing frequency, where the first dose comprises a first number of moles of the known protease-resistant or protease-resistant, hyperglycosylated polypeptide variant that is greater than a second number of moles of the parent IFN-γ in the second dose.

[1015] In one non-limiting example, the parent IFN-γ is IFN-γ1b and is proven to be effective in the treatment of a fibrotic disorder in a method comprising administering to a patient in need thereof 200 micrograms (1.2×10⁻⁸ mol.) of IFN-γ1b by subcutaneous bolus injection three times per week for 1 year or more. In some of these embodiments, the known protease-resistant or protease-resistant, hyperglycosylated polypeptide variant of the parent IFN-γ1b can be, e.g., selected from the group of the [S99T]IFN-γ, [E38N]IFN-γ, [E38N, S40T]IFN-γ, [E38N, S99T]IFN-γ, and [E38N, S40T, S99T]IFN-γ glycopeptides, where the glycopeptide variant further comprises one or more of the amino acid replacements set forth in Table 3 (IFN-γ), such that the glycopeptide variant comprises at least one mutated protease cleavage site in place of a native protease cleavage site found in the parent IFN-γ polypeptide; and administered orally to the patient in the first dose containing the first number of moles of the known protease-resistant or protease-resistant, hyperglycosylated polypeptide variant at the first dosing frequency, where the first number of moles is greater than 1.2×10^{31 8} mol., or at least about 2.4×10⁻⁸ mol., or at least about 3.6×10⁻⁸ mol., or at least about 4.8×10⁻⁸ mol., or at least about 6.0×10⁻⁸ mol., or at least about 7.2×10⁻⁸ mol., or at least about 8.4×10⁻⁸ mol., or at least about 9.6×10⁻⁸ mol., or at least about 1.1×10⁻⁷ mol., or at least about 1.2×10⁻⁷ mol., or at least about 1.0×10⁻⁶ mol., and where the first dosing frequency is at least three times per week. Alternatively, the first dosing frequency, where the first dosing frequency is four times per week, five times per week, six times per week, once per day, twice per day, or three times per day.

[1016] In some embodiments, the invention provides any of the foregoing methods of treating a fibrotic disorder with a known protease-resistant or protease-resistant, hyperglycosylated polypeptide variant of IFN-γ, where the fibrotic disorder is a pulmonary fibrotic disorder, such as idiopathic pulmonary fibrosis, or a liver fibrotic disorder. In some of the subject methods of treating idiopathic pulmonary fibrosis, the patient has an initial forced vital capacity (FVC)≧55% of the predicted normal FVC. In other methods of the invention for treating idiopathic pulmonary fibrosis, the patient has an initial carbon monoxide diffusing capacity (DL_{CO})≧35% of the predicted normal DL_{CO}. In still other methods of the invention for treating idiopathic pulmonary fibrosis, the patient has an initial forced vital capacity (FVC)≧55% of the predicted normal FVC and an initial carbon monoxide diffusing capacity (DL_{CO})≧35% of the predicted normal DL_{CO}.

[1017] In some embodiments, the invention provides any of the foregoing methods of treating a fibrotic disorder with a known protease-resistant or protease-resistant, hyperglycosylated polypeptide variant of an IFN-γ, in which the known protease-resistant or protease-resistant, hyperglycosylated polypeptide variant comprises any of the carrier peptides described in Table 9 above in a covalent or non-covalent association with the desired polypeptide variant. In some of these embodiments, the known protease-resistant or protease-resistant, hyperglycosylated polypeptide variant comprises any such carrier peptide in a direct or indirect covalent linkage with the desired polypeptide variant, including without limitation any such carrier peptide fused to the N-terminus of the desired polypeptide variant.

[1018] In some embodiments, the invention provides any of the foregoing methods of treating a disease in a patient with a known protease-resistant or protease-resistant, hyperglycosylated polypeptide variant of a parent IFN-γ1b therapeutic, where the method is modified to use any protease-resistant variant of glycosylated native (wild-type) human IFN-γ (described in WO 02/081507) as the known protease-resistant or protease-resistant, hyperglycosylated polypeptide variant of the parent IFN-γ1b therapeutic. In one non-limiting example, the protease-resistant variant of glycosylated native human IFN-γ comprises one or more of the amino acid replacements set forth in Table 3 (IFN-γ), such that the variant comprises at least one mutated protease cleavage site in place of a native protease cleavage site in the parent IFN-γ1b polypeptide.

Treatment Methods Using IFN-β

[1019] In some embodiments, where the known protease-resistant or protease-resistant, hyperglycosylated polypeptide variant is a known protease-resistant or protease-resistant, hyperglycosylated IFN-β, a subject method provides for administering to an individual in need thereof a therapeutically effective amount of the known protease-resistant or protease-resistant, hyperglycosylated IFN-β in a method of treating multiple sclerosis. The method generally comprises orally administering a known protease-resistant or protease-resistant, hyperglycosylated polypeptide variant of a parent IFN-β to an individual in need thereof in a first dose at a first dosing frequency that is at least as frequent, or more frequent, than a second dosing frequency proven to be effective in a regimen for treatment of multiple sclerosis comprising administering to an individual in need thereof a parenteral formulation of the parent IFN-β in a second dose at the second dosing frequency, where the first dose comprises a first number of moles of the known protease-resistant or protease-resistant, hyperglycosylated polypeptide variant that is greater than a second number of moles of the parent IFN-β in the second dose.

[1020] In one non-limiting example, the parent IFN-β1 therapeutic is IFN-β1b and is proven to be effective in the treatment of multiple sclerosis in a method comprising administering to a patient in need thereof 0.25 mg (or 1.35×10⁻⁸ mol.) IFN-β1b (BETASERON®) by subcutaneous bolus injection every other day for the desired treatment duration. In some of these embodiments, the known protease-resistant or protease-resistant, hyperglycosylated polypeptide variant is a known protease-resistant variant of the active ingredient of AVONEX® IFN-β1a, (e.g., where the protease-resistant variant comprises one or more of the amino acid changes set forth in Table 2) and is administered orally to the patient in the first dose containing the first number of moles of the variant at the first dosing frequency, where the first number of moles is greater than 1.35×10⁻⁸ mol., or at least about 2.7×10⁻⁸ mol., or at least about 4.0×10⁻⁸ mol., or at least about 5.4×10⁻⁸ mol., or at least about 6.75×10⁻⁸ mol., or at least about 8.1×10⁻⁸ mol., or at least about 9.45×10⁻⁸ mol., or at least about 1.1×10⁻⁷ mol., or at least about 1.2×10⁷ mol., or at least about 1.35×10⁷ mol., or at least about 1.35×10⁻⁶ mol., and where the first dosing frequency is at least every other day. Alternatively, the first dosing frequency is four times per week, five times per week, six times per week, once per day, twice per day, or three times per day.

Treatment Methods Using Erythropoietin (EPO)

[1021] In some embodiments, where the known protease-resistant or protease-resistant, hyperglycosylated polypeptide variant is a known protease-resistant or protease-resistant, hyperglycosylated EPO, a subject method provides for administering to an individual in need thereof a therapeutically effective amount of a known protease-resistant or protease-resistant, hyperglycosylated EPO in a method of treating anemia. The method generally comprises orally administering a known protease-resistant or protease-resistant, hyperglycosylated polypeptide variant of a parent EPO to an individual in need thereof in a first dose at a first dosing frequency that is at least as frequent, or more frequent, than a second dosing frequency proven to be effective in a regimen for treatment of anemia comprising administering to an individual in need thereof a parenteral formulation of the parent EPO in a second dose at the second dosing frequency, where the first dose comprises a first number of moles of the known protease-resistant or protease-resistant, hyperglycosylated polypeptide variant that is greater than a second number of moles of the parent EPO in the second dose.

[1022] In one non-limiting example, the parent EPO is proven to be effective in the treatment of anemia in a method comprising administering to a patient in need thereof 100 Units (770 micrograms or 2.5×10⁻⁸ mol.) EPOGEN® epoetin alfa per kilogram of patient body weight by subcutaneous bolus injection three times per week for the desired treatment duration. In some of these embodiments, the known protease-resistant or protease-resistant, hyperglycosylated polypeptide variant is a protease-resistant variant of the active ingredient of ARANESP® darbepoetin alfa, (e.g., where the protease-resistant or protease-resistant, hyperglycosylated variant comprises one or more of the amino acid changes set forth in Table 4) and administered orally to the patient in the first dose containing the first number of moles of the variant at the first dosing frequency, where the first number of moles is the product of greater than 2.5×10⁻⁸ mol., or at least about 5.0×10⁻⁸ mol., or at least about 7.5×10⁻⁸ mol., or at least about 1.0×10⁻⁷ mol., or at least about 1.25×10⁻⁷ mol., or at least about 1.5×10⁻⁷ mol., or at least about 1.75×10⁻⁷ mol., or at least about 2.0×10⁻⁷ mol., or at least about 2.25×10⁻⁷ mol., or at least about 2.5×10⁻⁷ mol., or at least about 2.5×10⁻⁶ mol., per kilogram of the patient's body weight multiplied by the patient's body weight, and where the first dosing frequency is at least three times per week. Alternatively, the first dosing frequency is four times per week, five times per week, six times per week, once per day, twice per day, or three times per day.

[1023] In another non-limiting example, the parent EPO is proven to be effective in the treatment of anemia in a method comprising administering to a patient in need thereof 50 Units (385 micrograms or 1.25×10⁻⁸ mol.) EPOGEN® epoetin alfa per kilogram of patient body weight by subcutaneous bolus injection three times per week for the desired treatment duration. In some of these embodiments, the known protease-resistant or protease-resistant, hyperglycosylated polypeptide variant is a known protease-resistant variant of the active ingredient of ARANESP® darbepoetin alfa, (e.g., where the protease-resistant or protease-resistant, hyperglycosylated variant comprises one or more of the amino acid changes set forth in Table 4) and is administered orally to the patient in the first dose containing the first number of moles of the variant at the first dosing frequency, where the first number of moles is the product of greater than 1.25×10⁻⁸ mol., or at least about 2.5×10⁻⁸ mol., or at least about 3.75×10⁻⁸ mol., or at least about 5.0×10⁻⁸ mol., or at least about 6.25×10⁻⁸ mol., or at least about 7.5×10⁻⁸ mol., or at least about 8.75×10⁻⁸ mol., or at least about 1.0×10⁻⁷ mol., or at least about 1.125×10⁻⁷mol., or at least about 1.25×10⁻⁷ mol., or at least about 1.25×10⁻⁶ mol., per kilogram of the patient's body weight multiplied by the patient's body weight, and where the first dosing frequency is at least three time per week. Alternatively, the first dosing frequency is four times per week, five times per week, six times per week, once per day, twice per day, or three times per day.

Kits and Containers

[1024] The present invention provides a container comprising a known protease-resistant or protease-resistant, hyperglycosylated polypeptide variant. The invention further provides a kit comprising a formulation comprising a unit dosage form of a known protease-resistant or protease-resistant, hyperglycosylated polypeptide variant in a container, and a label that provides instructions for use of the kit.

[1025] Suitable containers include those adapted for administration by subcutaneous injection, including a syringe (for use with a needle), an injector pen, and the like. In some embodiments, a subject agonist is administered with a pen injector (e.g., a medication delivery pen), a number of which are known in the art. Exemplary devices which can be adapted for use in the present methods are any of a variety of pen injectors from Becton Dickinson, e.g., BD™ Pen, BD™ Pen II, BD™ Auto-Injector; a pen injector from Innoject, Inc.; any of the medication delivery pen devices discussed in U.S. Pat. Nos. 5,728,074, 6,096,010, 6,146,361, 6,248,095, 6,277,099, and 6,221,053; and the like. The medication delivery pen can be disposable, or reusable and refillable. Also suitable for use is an Intraject® needle-free injection system (Aradigm Corp.).

[1026] The invention further provides a drug delivery device comprising (e.g., pre-loaded with) a reservoir containing a liquid formulation that comprises a single dose of a subject glycosylated synthetic Type I interferon receptor polypeptide agonist. In some embodiments, the present invention provides a pre-filled syringe comprising a pharmaceutical composition comprising a subject glycosylated synthetic Type I interferon receptor polypeptide agonist.

[1027] The present invention provides formulations comprising a subject glycosylated synthetic Type I interferon receptor polypeptide agonist and a glycosylated IFN-γ in a single liquid formulation that is contained in a single reservoir, for use in a drug delivery device. In some aspects, the present invention provides a drug reservoir or other container containing a subject glycosylated synthetic Type I interferon receptor polypeptide agonist and a glycosylated IFN-γ co-formulated in a liquid, wherein both the subject glycosylated synthetic Type I interferon receptor polypeptide agonist and glycosylated IFN-γ are present in the formulation in an amount suitable for one dose each. The reservoir can be provided in any of a variety of forms, including, but not limited to, a cartridge, a syringe, a reservoir of a continuous delivery device, and the like.

[1028] The invention further provides a drug delivery device comprising (e.g., pre-loaded with) a reservoir containing a liquid formulation that comprises a single dose of a subject glycosylated synthetic Type I interferon receptor polypeptide agonist and a single dose of glycosylated IFN-γ. Exemplary, non-limiting drug delivery devices include injections devices, such as pen injectors, needle/syringe devices, continuous delivery devices, and the like. Any of the dosage amounts, including synergistically effective amounts, described herein can be used in the pharmaceutical formulation, in the reservoir, or in the drug delivery device.

[1029] In some embodiments, the present invention provides a pre-filled syringe comprising a pharmaceutical composition comprising a subject glycosylated synthetic Type I in terferon receptor polypeptide agonist, a glycosylated IFN-γ, and a pharmaceutically acceptable excipient, where the subject glycosylated synthetic Type I interferon receptor polypeptide agonist and the glycosylated IFN-γ are co-formulated.

[1030] In other embodiments, the present invention provides a syringe comprising (a) a first barrel pre-filled with a pharmaceutical composition comprising a subject glycosylated synthetic Type I interferon receptor polypeptide agonist; (b) a second barrel pre-filled with a pharmaceutical composition comprising a glycosylated IFN-γ.

[1031] In some embodiments, the present invention provides a container comprising a known protease-resistant or protease-resistant, hyperglycosylated polypeptide variant in a formulation suitable for oral delivery. Formulations suitable for oral delivery include liquid formulations, solid formulations (e.g., tablets, capsules, and the like), and semi-solid formulations (e.g., gels, gel capsules, etc.).

Subjects Suitable for Treatment

[1032] The subject methods are suitable for treating individuals having, or susceptible to having, a variety of disorders. In many embodiments, the individual is a human.

Fibrotic Disorders

[1033] The subject methods for treating fibrotic disorders are suitable for treatment of individuals diagnosed as having a fibrotic disorder. Fibrotic disorders include, but are not limited to, pulmonary fibrosis, including idiopathic pulmonary fibrosis (IPF) and pulmonary fibrosis from a known etiology, liver fibrosis, and renal fibrosis. Other exemplary fibrotic conditions include musculoskeletal fibrosis, cardiac fibrosis, post-surgical adhesions, scleroderma, glaucoma, and skin lesions such as keloids.

Cancer

[1034] Subjects suitable for treatment with a subject method for treating cancer include individuals having any type of cancer. Also suitable for treatment are individuals who have failed previous treatment for a cancer with a standard cancer chemotherapeutic agent. Also suitable for treatment are individuals who have been previously treated with a standard cancer chemotherapeutic agent, who initially responded to such treatment, and in whom the cancer subsequently reappeared. Also suitable for treatment are individuals who failed to respond to treatment with another agent for treating cancer.

HCV Infection

[1035] Individuals who are to be treated according to the methods of the invention for treating an HCV infection include individuals who have been clinically diagnosed as infected with HCV. Individuals who are infected with HCV are identified as having HCV RNA in their blood, and/or having anti-HCV antibody in their serum.

[1036] Individuals who are clinically diagnosed as infected with HCV include naive individuals (e.g., individuals not previously treated for HCV, particularly those who have not previously received IFN-α-based and/or ribavirin-based therapy) and individuals who have failed prior treatment for HCV (“treatment failure” patients). Treatment failure patients include non-responders (i.e., individuals in whom the HCV titer was not significantly or sufficiently reduced by a previous treatment for HCV, e.g., a previous IFN-α monotherapy, a previous IFN-α and ribavirin combination therapy, or a previous pegylated IFN-α and ribavirin combination therapy); and relapsers (i.e., individuals who were previously treated for HCV, e.g., who received a previous IFN-α monotherapy, a previous IFN-α and ribavirin combination therapy, or a previous pegylated IFN-α and ribavirin combination therapy, whose HCV titer decreased, and subsequently increased).

[1037] In particular embodiments of interest, individuals have an HCV titer of at least about 10⁵, at least about 5×10⁵, or at least about 106, or at least about 2×10⁶, genome copies of HCV per milliliter of serum. The patient may be infected with any HCV genotype (genotype 1, including 1a and 1b, 2, 3, 4, 6, etc. and subtypes (e.g., 2a, 2b, 3a, etc.)), particularly a difficult to treat genotype such as HCV genotype 1 and particular HCV subtypes and quasispecies.

[1038] Also of interest are HCV-positive individuals (as described above) who exhibit severe fibrosis or early cirrhosis (non-decompensated, Child's-Pugh class A or less), or more advanced cirrhosis (decompensated, Child's-Pugh class B or C) due to chronic HCV infection and who are viremic despite prior anti-viral treatment with IFN-α-based therapies or who cannot tolerate IFN-α-based therapies, or who have a contraindication to such therapies. In particular embodiments of interest, HCV-positive individuals with stage 3 or 4 liver fibrosis according to the METAVIR scoring system are suitable for treatment with the methods of the present invention. In other embodiments, individuals suitable for treatment with the methods of the instant invention are patients with decompensated cirrhosis with clinical manifestations, including patients with far-advanced liver cirrhosis, including those awaiting liver transplantation. In still other embodiments, individuals suitable for treatment with the methods of the instant invention include patients with milder degrees of fibrosis including those with early fibrosis (stages 1 and 2 in the METAVIR, Ludwig, and Scheuer scoring systems; or stages 1, 2, or 3 in the Ishak scoring system.).

### EXAMPLES

[1039] The following examples are put forth so as to provide those of ordinary skill in the art with a complete disclosure and description of how to make and use the present invention, and are not intended to limit the scope of what the inventors regard as their invention nor are they intended to represent that the experiments below are all or the only experiments performed. Efforts have been made to ensure accuracy with respect to numbers used (e.g. amounts, temperature, etc.) but some experimental errors and deviations should be accounted for. Unless indicated otherwise, parts are parts by weight, molecular weight is weight average molecular weight, temperature is in degrees Celsius, and pressure is at or near atmospheric. Standard abbreviations may be used, e.g., bp, base pair(s); kb, kilobase(s); pl, picoliter(s); s or sec, second(s); min, minute(s); h or hr, hour(s); aa, amino acid(s); kb, kilobase(s); bp, base pair(s); nt, nucleotide(s); i.m., intramuscular(ly); i.p., intraperitoneal(ly); s.c., subcutaneous(ly); and the like.

### Example 1

### Construction of Hybrid Type I Interferon Receptor Polypeptide Agonists with Non-native Glycosylation Sites

[1040] Among Type I interferons, two interferon alpha subtypes (IFN alpha 2b and 14), IFN beta 1 and IFN Omega 1 are naturally glycosylated in mammalian cells (FIG. 24). FIG. 24 provides an amino acid sequence comparison of the amino acid sequences of Infergen (SEQ ID NO:1356) and Type I Interferon species (SEQ ID NOs:1357-1360) that have been reported to be glycosylated naturally. The amino acid residues where the glycosylations occur are labeled with bold outlined boxes. The asparagines residues are the anchoring site for N-link glycosylation and the threonine residue is the anchoring site for O-link glycosylation. The majority sequence is shown above (SEQ ID NO: 1355).

[1041] Based on the high degree of amino acid sequence identity between Infergen and other Type I interferons, glycosylation sites were designed in Infergen on the basis of amino acid sequence alignment of Infergen with the naturally glycosylated type I interferons (FIG. 25). FIG. 25 provides an amino acid sequence comparison of the amino acid sequences of amino acids 61-120 of Infergen (SEQ ID NO:1362) and various embodiments of subject glycosylated mutants (SEQ ID NOs:1363-1373). Sites 1, 2 and 3 are examples of positions where glycosylation sites are created. Only N-link glycosylation sites are generated at Sites 1 and 2. Both N-link and O-link glycosylation sites are generated at Site 3. N-linked and O-linked glycosylation sites were engineered into Infergen. N-linked glycosylation involves a unique oligosaccharide branch structure that is attached to an asparagine residue found in an Asn-X-Ser/Thr motif. O-linked glycosylation consists of an oligosaccharide chain or glycosaminoglycan chains added to the OH group of serine or threonine residues. A majority sequence is shown above (SEQ IDNO:1361).

Experimental Design

[1042] Designing an Infergen gene optimizedfor expression in human cells. Currently, Infergen is produced in E. coli and therefore contains codons optimized for bacterial expression. Glycosylated Infergen must be generated in mammalian cell lines. To increase the protein expression level in mammalian cells, a new Infergen gene with human codon usage preference (Table 8) was designed and synthesized using the most frequent codon for each amino acid is selected (FIG. 26). FIG. 26 depicts an exemplary synthetic mammalian Infergen nucleic acid sequence with preferred human codon usage. The open reading frame is indicated with translated Infergen amino acid sequence (SEQ ID NO:1356). Six pairs of complementary primers from A to F are shown in alternating italics and bold text. The upper sense strands of the primer pairs are identified with odd number and lower non-sense strands are identified with even number. In the region upstream of the start codon ATG, a short sequence of GCCACC, the Kozak consensus sequence, is designed to increase eukaryotic translation efficiency. Two tandem stop codons —TAA and TGA— are used to ensure complete termination of translation. Table 8 (above) provides human codon usage preference. From, “Molecular Cloning: A Laboratory Manual” Sambrook J. and Russell D. W. Third Edition (2001) Cold Spring Harbor Press.

[1043] Strategies for construction ofsynthetic Mammalian Infergen gene. Since the new Mammalian Infergen DNA sequence is synthetic rather than naturally occurring, chemical synthesis of the gene is the reasonable route of synthesis. Typically chemical synthesis of a gene involves the synthesis short oligonucleotides, their annealing, ligation and cloning into a plasmid. A total of 6 pairs of oligonucleotides were used to produce a synthetic mammalian Infergen gene (FIG. 26).

[1044] Each pair of annealed primers has terminal sequence that allows it to anneal to the adjacent oligonucleotide. The 5′ and 3′ end of the synthetic gene contain Hind III and Eco RI restriction endonuclease sites, respectively, which allows ligation into the plasmid. Detailed sequence information of these primers is given (Table 11).

TABLE 11

Sequences of primers for chemical gene
synthesis of Mammalian Infergen.

| | | |
|---|---|---|
| Primer | Sense | Sequence (in 5′ to 3′ orientation |

| | |
|---|---|
| | [Phosp] AGCTTGCCACCATGTGCGACCTGCCCCAG |
| | ACCCACAGCCTGGGCAACCGCCGCGCCCTGATCCTGC |
| | TGGCCCAGATGCGCCGCATCAGCCCC |
| | (SEQ ID NO: 1338) |
| | [Phosp] GCGGCGCATCTGGGCCAGCAGGATCAGGG |
| | CGCGGCGGTTGCCCAGGCTGTGGGTCTGGGGCAGGTC |
| | GCACATGGTGGCA |
| | (SEQ ID NO: 1339) |
| | [Phosp] TTCAGCTGCCTGAAGGACCGCCACGACTT |
| | CGGCTTCCCCCAGGAGGAGTTCGACGGCAACCAGTTC |
| | CAGAAGGCCCAGGCCATCAGCG |
| | (SEQ ID NO: 1340) |
| | [Phosp] CCTGGGCCTTCTGGAACTGGTTGCCGTCG |
| | AACTCCTCCTGGGGGAAGCCGAAGTCGTGGCGGTCCT |
| | TCAGGCAGCTGAAGGGGCTGAT |
| | (SEQ ID NO: 1341) |
| Yes | [Phosp] TGCTGCACGAGATGATCCAGCAGACCTTC |
| | AACCTGTTCAGCACCAAGGACAGCAGCGCCGCCTGGG |
| | ACGAGAGCCTGCTGGAGAAG |
| | (SEQ ID NO: 1342) |
| No | [Phosp] AGGCTCTCGTCCCAGGCGGCGCTGCTGTC |
| | CTTGGTGCTGAACAGGTTGAAGGTCTGCTGGATCATC |
| | TCGTGCAGCACGCTGATGG |
| | (SEQ ID NO: 1343) |
| | [Phosp] TTCTACACCGAGCTGTACCAGCAGCTGAA |
| | CGACCTGGAGGCCTGCGTGATCCAGGAGGTGGGCGTG |
| | GAGGAGACCCCCCTGATGAACGTGG |
| | (SEQ ID NO: 1344) |
| No | [Phosp] TCAGGGGGGTCTCCTCCACGCCCACCTCC |
| | TGGATCACGCAGGCCTCCAGGTCGTTCAGCTGCTGGT |
| | ACAGCTCGGTGTAGAACTTCTCCAGC |
| | (SEQ ID NO: 1345) |
| Yes | [Phosp] ACAGCATCCTGGCCGTGAAGAAGTACTTC |
| | CAGCGCATCACCCTGTACCTGACCGAGAAGAAGTACA |
| | GCCCCTGCGCCTGGGAGGTGG |
| | (SEQ ID NO: 1346) |
| No | [Phosp] AGGCGCAGGGGCTGTACTTCTTCTCGGTC |
| | AGGTACAGGGTGATGCGCTGGAAGTACTTCTTCACGG |
| | CCAGGATGCTGTCCACGTTCA |
| | (SEQ ID NO: 1347) |
| Yes | [Phosp] TGCGCGCCGAGATCATGCGCAGCTTCAGC |
| | CTGAGCACCAACCTGCAGGAGCGCCTGCGCCGCAAGG |
| | AGTAATGAG |
| | (SEQ ID NO: 1348) |
| No | [Phosp] AATTCTCATTACTCCTTGCGGCGCAGGCG |
| | CTCCTGCAGGTTGGTGCTCAGGCTGAAGCTGCGCATG |
| | ATCTCGGCGCGCACCACCTCCC |
| | (SEQ ID NO: 1349) |

[1045] Strategies for generating Mammalian Infergen glycosylation mutants. The sequence changes needed to produce mammalian, glycosylation competent Infergen are minor and can be introduced into the synthetic gene by standard site directed mutagenesis techniques (FIG. 27). FIG. 27 depicts a comparison of the nucleic acid sequences of Mammalian Infergen (SEQ ID NO:1375) and glycosylated mutants thereof (SEQ ID NOs:1376-1386); with the majority sequence shown above (SEQ ID NO:1374). The nucleotides that differ are shown in boxes. Codons used based on the preferred codon usage in mammals (Table 8). The nucleotides that differ from the majority sequence are shown in boxes.

[1046] FIG. 28 depicts an amino acid sequence comparison of human Interferon beta 1 (SEQ ID NO:1391) and exemplary IFN-β1 glycosylated mutants (SEQ ID NOs:1392-1396); with the majority sequence (SEQ ID NO:1390) shown above. Sites 1 and 2 are the positions where glycosylation mutants are generated. In general, only N-linked glycosylation sites are created at Site 1. Both N-linked and O-linked glycosylation sites are generated at Site 2. The naturally occurring N-linked glycosylation sites in human IFN-β1 and mutants are shown in boxes.

[1047] FIG. 29 depicts an amino acid sequence comparison of human Interferon omega-1 (SEQ ID NO:1398) and exemplary glycosylation mutants (SEQ ID NOs:1399-1403); with the majority sequence (SEQ ID NO:1397) shown above. Sites 1 and 2 are the positions where glycosylation mutants are generated. In general, only N-linked glycosylation sites are created at Site 1. Both N-linked and O-linked glycosylation sites are generated at Site 2. The naturally occurring N-linked glycosylation sites in human IFN-ω1 and mutants are shown in boxes.

### Example 2

### Design, Construction, Expression and Glycosylation Sites Generation of Mammalian Infergen Fusion Constructs with Other Type I Interferon Signal Peptides

Materials and Methods

[1048] Construction of Fusion Genes

[1049] The amino acid alignments of Infergen, and exemplary Infergen fusion proteins, human Interferon Alpha 14 and Beta are shown in FIG. 30. A two-step polymerase chain reaction strategy was designed to synthesize the fusion genes for the proposed fusion proteins. The primers used in the PCR reactions are listed in Table 12, below.

TABLE 12

| | |
|---|---|
| Primer Name | Sequence (5′ to 3′) |

| | |
|---|---|
| IFNa14_Inner | GCCCTGGTGGTGCTGAGCTGCAAGAGCAGC- |
| | TGCAGCCTGGGCTGCGACCTGCCCCAGACCCACAGC |
| | (SEQ ID NO: 1350) |
| IFNa14_Outer | TATAAAGCTTGCCACCATGGCCCTGCCCTTC- |
| | GCCCTGATGATGGCCCTGGTGGTGCTGAGCTGCAAG |
| | (SEQ ID NO: 1351) |
| IFNb_Inner | GCCCTGCTGCTGTGCTTCAGCACCACCGCCC- |
| | TGAGCATGAGCTGCGACCTGCCCCAGACCCACAGC |
| | (SEQ ID NO: 1352) |
| IFNb_Outer | TATAAAGCTTGCCACCATGACCAACAAGTGC- |
| | CTGCTGCAGATCGCCCTGCTGCTGTGCTTCAGCACC |
| | (SEQ ID NO: 1353) |
| INFERGEN_End | TATAGAATTCTCATTACTCCTTGCGGCGCAGGCG |
| | (SEQ ID NO: 1354) |

[1050] The mammalian Infergen gene was synthesized and cloned into pcDNA3.1 (Invitrogen, Carlsbad, CA) plasmid and was used as template. For the first round PCR to generate fusion Infergen gene with human Interferon Alpha 14 signal peptide, IFNa14_Inner primer was combined with INFERGEN End primer to generate PCR templates for second round PCR that was carried out using IFNα14_Outer primer in combination with INFERGEN_END primer. The final PCR product was digested with both Hind III and EcoRI and cloned into predigested pcDNA3.1 vector. The same procedure was applied to generate Infergen gene with human Interferon Beta signal peptide except that IFNb_Inner and Outer primers were used to replace IFNa14_Inner and Outer primers, respectively.

[1051] Transient Transfection and Western Analysis

[1052] The Cos-7 cell line was selected to transiently over-express Infergen. Fugene-6 (Roche Applied Science, Indianapolis, IN) was used as the transfection reagent and the manufacturer's protocol was followed. Three days after the transfection, conditioned media was collected, then filtered through 0.22 μM Tissue Culture Filter Unit and concentrated with Centriplus YM-10 Centrifugal Filter Unit (Millipore, Billerica, Mass.). Protein concentrations were measured. The attached cells were collected and cell lysate made using conventional methods. Rabbit polyclonal antibodies made against E. coli over-expressed Infergen were used as primary antibodies in Western analysis.

[1053] Site-directed Mutagenesis

[1054] The locations of exemplary glycosylation sites in the two fusion Infergen proteins are shown in FIG. 25. The QuikChange site-directed mutagenesis kit (Stratagene, La Jolla, Calif.) was used to generate these mutations.

Results

[1055] The fusion constructs were generated and the sequences confirmed. FIG. 30 depicts an amino acid sequence alignment of Infergen (SEQ ID NO:1356), human IFN-α14 (SEQ ID NO:1358), human IFN-β1 (SEQ ID NO:1359), and exemplary fusion proteins with human IFN-α14 and human IFN-β signal peptides (SEQ ID NOs:1388 and 1389, respectively). The majority sequence is shown above (SEQ ID NO:1387).

[1056] The constructs were then transiently transfected into Cos-7 cells and the transfection results were analyzed with western blot using rabbit polyclonal antibodies against Infergen. The results are shown in FIG. 32.

[1057] FIG. 32 depicts Western blot analysis of the transient transfection results. Lanes 1-4 were loaded with conditioned media from Cos-7 cells transfected with a plasmid containing nucleotide sequences encoding: Infergen with IFN-α14 signal peptide (lane 1); Infergen with IFN-β signal peptide (lane 2); Infergen without signal peptide (lane 3); and P-galactosidase (lane 4). Lanes 5-8 were loaded with cell lysates of Cos-7 cells transfected with plasmids a plasmid containing nucleotide sequences encoding: Infergen with IFN-α14 signal peptide (lane 5); Infergen with IFN-β signal peptide (lane 6); Infergen without signal peptide (lane 7); and β-galactosidase (lane 8). Lane 9 was loaded with 30 ng of Infergen, produced by E. coli and obtained from a commercial source.

[1058] The results showed that both fusion proteins expressed well and were mostly secreted by the cells into the conditioned media, while the Infergen without signal peptide expressed poorly and existed intracellularly. The two fusion genes were selected as templates for generation of glycosylation sites.

[1059] While the present invention has been described with reference to the specific embodiments thereof, it should be understood by those skilled in the art that various changes may be made and equivalents may be substituted without departing from the true spirit and scope of the invention. In addition, many modifications may be made to adapt a particular situation, material, composition of matter, process, process step or steps, to the objective, spirit and scope of the present invention. All such modifications are intended to be within the scope of the claims appended hereto.

The application's sequence listing, which the Patent Office published only in electronic form, follows.

SEQUENCE LISTING (1354 sequences)

SEQ ID NO: 1 - protein, 165 aa, Homo sapiens [sequence omitted]

SEQ ID NO: 2 - protein, 165 aa, Artificial Sequence
  D2A Mutant IFN-alpha 2b
CALPQTHSLGSRRTLMLLAQMRRISLFSCLKDRHDFGFPQEEFGNQFQKAETIPVLHEMIQQIFNLFSTKDSSAAWDETLLDKFYTELYQQLNDLEACVIQGVGVTETPLMKEDSILAVRKYFQRITLYLKEKKYSPCAWEVVRAEIMRSFSLSTNLQESLRSKE

SEQ ID NO: 3 - protein, 165 aa, Artificial Sequence
  P4A Mutant IFN-alpha 2b
CDLAQTHSLGSRRTLMLLAQMRRISLFSCLKDRHDFGFPQEEFGNQFQKAETIPVLHEMIQQIFNLFSTKDSSAAWDETLLDKFYTELYQQLNDLEACVIQGVGVTETPLMKEDSILAVRKYFQRITLYLKEKKYSPCAWEVVRAEIMRSFSLSTNLQESLRSKE

SEQ ID NO: 4 - protein, 165 aa, Artificial Sequence
  Q5A Mutant IFN-alpha 2b
CDLPATHSLGSRRTLMLLAQMRRISLFSCLKDRHDFGFPQEEFGNQFQKAETIPVLHEMIQQIFNLFSTKDSSAAWDETLLDKFYTELYQQLNDLEACVIQGVGVTETPLMKEDSILAVRKYFQRITLYLKEKKYSPCAWEVVRAEIMRSFSLSTNLQESLRSKE

SEQ ID NO: 5 - protein, 165 aa, Artificial Sequence
  T6A Mutant IFN-alpha 2b
CDLPQAHSLGSRRTLMLLAQMRRISLFSCLKDRHDFGFPQEEFGNQFQKAETIPVLHEMIQQIFNLFSTKDSSAAWDETLLDKFYTELYQQLNDLEACVIQGVGVTETPLMKEDSILAVRKYFQRITLYLKEKKYSPCAWEVVRAEIMRSFSLSTNLQESLRSKE

SEQ ID NO: 6 - protein, 165 aa, Artificial Sequence
  H7A Mutant IFN-alpha 2b
CDLPQTASLGSRRTLMLLAQMRRISLFSCLKDRHDFGFPQEEFGNQFQKAETIPVLHEMIQQIFNLFSTKDSSAAWDETLLDKFYTELYQQLNDLEACVIQGVGVTETPLMKEDSILAVRKYFQRITLYLKEKKYSPCAWEVVRAEIMRSFSLSTNLQESLRSKE

SEQ ID NO: 7 - protein, 165 aa, Artificial Sequence
  S8A Mutant IFN-alpha 2b
CDLPQTHALGSRRTLMLLAQMRRISLFSCLKDRHDFGFPQEEFGNQFQKAETIPVLHEMIQQIFNLFSTKDSSAAWDETLLDKFYTELYQQLNDLEACVIQGVGVTETPLMKEDSILAVRKYFQRITLYLKEKKYSPCAWEVVRAEIMRSFSLSTNLQESLRSKE

SEQ ID NO: 8 - protein, 165 aa, Artificial Sequence
  L9A Mutant IFN-alpha 2b
CDLPQTHSAGSRRTLMLLAQMRRISLFSCLKDRHDFGFPQEEFGNQFQKAETIPVLHEMIQQIFNLFSTKDSSAAWDETLLDKFYTELYQQLNDLEACVIQGVGVTETPLMKEDSILAVRKYFQRITLYLKEKKYSPCAWEVVRAEIMRSFSLSTNLQESLRSKE

SEQ ID NO: 9 - protein, 165 aa, Artificial Sequence
  G10A Mutant IFN-alpha 2b
CDLPQTHSLASRRTLMLLAQMRRISLFSCLKDRHDFGFPQEEFGNQFQKAETIPVLHEMIQQIFNLFSTKDSSAAWDETLLDKFYTELYQQLNDLEACVIQGVGVTETPLMKEDSILAVRKYFQRITLYLKEKKYSPCAWEVVRAEIMRSFSLSTNLQESLRSKE

SEQ ID NO: 10 - protein, 165 aa, Artificial Sequence
  S11A Mutant IFN-alpha 2b
CDLPQTHSLGARRTLMLLAQMRRISLFSCLKDRHDFGFPQEEFGNQFQKAETIPVLHEMIQQIFNLFSTKDSSAAWDETLLDKFYTELYQQLNDLEACVIQGVGVTETPLMKEDSILAVRKYFQRITLYLKEKKYSPCAWEVVRAEIMRSFSLSTNLQESLRSKE

SEQ ID NO: 11 - protein, 165 aa, Artificial Sequence
  R12A Mutant IFN-alpha 2b
CDLPQTHSLGSARTLMLLAQMRRISLFSCLKDRHDFGFPQEEFGNQFQKAETIPVLHEMIQQIFNLFSTKDSSAAWDETLLDKFYTELYQQLNDLEACVIQGVGVTETPLMKEDSILAVRKYFQRITLYLKEKKYSPCAWEVVRAEIMRSFSLSTNLQESLRSKE

SEQ ID NO: 12 - protein, 165 aa, Artificial Sequence
  R13A Mutant IFN-alpha 2b
CDLPQTHSLGSRATLMLLAQMRRISLFSCLKDRHDFGFPQEEFGNQFQKAETIPVLHEMIQQIFNLFSTKDSSAAWDETLLDKFYTELYQQLNDLEACVIQGVGVTETPLMKEDSILAVRKYFQRITLYLKEKKYSPCAWEVVRAEIMRSFSLSTNLQESLRSKE

SEQ ID NO: 13 - protein, 165 aa, Artificial Sequence
  T14A Mutant IFN-alpha 2b
CDLPQTHSLGSRRALMLLAQMRRISLFSCLKDRHDFGFPQEEFGNQFQKAETIPVLHEMIQQIFNLFSTKDSSAAWDETLLDKFYTELYQQLNDLEACVIQGVGVTETPLMKEDSILAVRKYFQRITLYLKEKKYSPCAWEVVRAEIMRSFSLSTNLQESLRSKE

SEQ ID NO: 14 - protein, 165 aa, Artificial Sequence
  L15A Mutant IFN-alpha 2b
CDLPQTHSLGSRRTAMLLAQMRRISLFSCLKDRHDFGFPQEEFGNQFQKAETIPVLHEMIQQIFNLFSTKDSSAAWDETLLDKFYTELYQQLNDLEACVIQGVGVTETPLMKEDSILAVRKYFQRITLYLKEKKYSPCAWEVVRAEIMRSFSLSTNLQESLRSKE

SEQ ID NO: 15 - protein, 165 aa, Artificial Sequence
  M16A Mutant IFN-alpha 2b
CDLPQTHSLGSRRTLALLAQMRRISLFSCLKDRHDFGFPQEEFGNQFQKAETIPVLHEMIQQIFNLFSTKDSSAAWDETLLDKFYTELYQQLNDLEACVIQGVGVTETPLMKEDSILAVRKYFQRITLYLKEKKYSPCAWEVVRAEIMRSFSLSTNLQESLRSKE

SEQ ID NO: 16 - protein, 165 aa, Artificial Sequence
  L17A Mutant IFN-alpha 2b
CDLPQTHSLGSRRTLMALAQMRRISLFSCLKDRHDFGFPQEEFGNQFQKAETIPVLHEMIQQIFNLFSTKDSSAAWDETLLDKFYTELYQQLNDLEACVIQGVGVTETPLMKEDSILAVRKYFQRITLYLKEKKYSPCAWEVVRAEIMRSFSLSTNLQESLRSKE

SEQ ID NO: 17 - protein, 165 aa, Artificial Sequence
  Q20A Mutant IFN-alpha 2b
CDLPQTHSLGSRRTLMLLAAMRRISLFSCLKDRHDFGFPQEEFGNQFQKAETIPVLHEMIQQIFNLFSTKDSSAAWDETLLDKFYTELYQQLNDLEACVIQGVGVTETPLMKEDSILAVRKYFQRITLYLKEKKYSPCAWEVVRAEIMRSFSLSTNLQESLRSKE

SEQ ID NO: 18 - protein, 165 aa, Artificial Sequence
  R23A Mutant IFN-alpha 2b
CDLPQTHSLGSRRTLMLLAQMRAISLFSCLKDRHDFGFPQEEFGNQFQKAETIPVLHEMIQQIFNLFSTKDSSAAWDETLLDKFYTELYQQLNDLEACVIQGVGVTETPLMKEDSILAVRKYFQRITLYLKEKKYSPCAWEVVRAEIMRSFSLSTNLQESLRSKE

SEQ ID NO: 19 - protein, 165 aa, Artificial Sequence
  I24A Mutant IFN-alpha 2b
CDLPQTHSLGSRRTLMLLAQMRRASLFSCLKDRHDFGFPQEEFGNQFQKAETIPVLHEMIQQIFNLFSTKDSSAAWDETLLDKFYTELYQQLNDLEACVIQGVGVTETPLMKEDSILAVRKYFQRITLYLKEKKYSPCAWEVVRAEIMRSFSLSTNLQESLRSKE

SEQ ID NO: 20 - protein, 165 aa, Artificial Sequence
  S25A Mutant IFN-alpha 2b
CDLPQTHSLGSRRTLMLLAQMRRIALFSCLKDRHDFGFPQEEFGNQFQKAETIPVLHEMIQQIFNLFSTKDSSAAWDETLLDKFYTELYQQLNDLEACVIQGVGVTETPLMKEDSILAVRKYFQRITLYLKEKKYSPCAWEVVRAEIMRSFSLSTNLQESLRSKE

SEQ ID NO: 21 - protein, 165 aa, Artificial Sequence
  L26A Mutant IFN-alpha 2b
CDLPQTHSLGSRRTLMLLAQMRRISAFSCLKDRHDFGFPQEEFGNQFQKAETIPVLHEMIQQIFNLFSTKDSSAAWDETLLDKFYTELYQQLNDLEACVIQGVGVTETPLMKEDSILAVRKYFQRITLYLKEKKYSPCAWEVVRAEIMRSFSLSTNLQESLRSKE

SEQ ID NO: 22 - protein, 165 aa, Artificial Sequence
  S28A Mutant IFN-alpha 2b
CDLPQTHSLGSRRTLMLLAQMRRISLFACLKDRHDFGFPQEEFGNQFQKAETIPVLHEMIQQIFNLFSTKDSSAAWDETLLDKFYTELYQQLNDLEACVIQGVGVTETPLMKEDSILAVRKYFQRITLYLKEKKYSPCAWEVVRAEIMRSFSLSTNLQESLRSKE

SEQ ID NO: 23 - protein, 165 aa, Artificial Sequence
  C29A Mutant IFN-alpha 2b
CDLPQTHSLGSRRTLMLLAQMRRISLFSALKDRHDFGFPQEEFGNQFQKAETIPVLHEMIQQIFNLFSTKDSSAAWDETLLDKFYTELYQQLNDLEACVIQGVGVTETPLMKEDSILAVRKYFQRITLYLKEKKYSPCAWEVVRAEIMRSFSLSTNLQESLRSKE

SEQ ID NO: 24 - protein, 165 aa, Artificial Sequence
  L30A Mutant IFN-alpha 2b
CDLPQTHSLGSRRTLMLLAQMRRISLFSCAKDRHDFGFPQEEFGNQFQKAETIPVLHEMIQQIFNLFSTKDSSAAWDETLLDKFYTELYQQLNDLEACVIQGVGVTETPLMKEDSILAVRKYFQRITLYLKEKKYSPCAWEVVRAEIMRSFSLSTNLQESLRSKE

SEQ ID NO: 25 - protein, 165 aa, Artificial Sequence
  K31A Mutant IFN-alpha 2b
CDLPQTHSLGSRRTLMLLAQMRRISLFSCLADRHDFGFPQEEFGNQFQKAETIPVLHEMIQQIFNLFSTKDSSAAWDETLLDKFYTELYQQLNDLEACVIQGVGVTETPLMKEDSILAVRKYFQRITLYLKEKKYSPCAWEVVRAEIMRSFSLSTNLQESLRSKE

SEQ ID NO: 26 - protein, 165 aa, Artificial Sequence
  D32A Mutant IFN-alpha 2b
CDLPQTHSLGSRRTLMLLAQMRRISLFSCLKARHDFGFPQEEFGNQFQKAETIPVLHEMIQQIFNLFSTKDSSAAWDETLLDKFYTELYQQLNDLEACVIQGVGVTETPLMKEDSILAVRKYFQRITLYLKEKKYSPCAWEVVRAEIMRSFSLSTNLQESLRSKE

SEQ ID NO: 27 - protein, 165 aa, Artificial Sequence
  R33A Mutant IFN-alpha 2b
CDLPQTHSLGSRRTLMLLAQMRRISLFSCLKDAHDFGFPQEEFGNQFQKAETIPVLHEMIQQIFNLFSTKDSSAAWDETLLDKFYTELYQQLNDLEACVIQGVGVTETPLMKEDSILAVRKYFQRITLYLKEKKYSPCAWEVVRAEIMRSFSLSTNLQESLRSKE

SEQ ID NO: 28 - protein, 165 aa, Artificial Sequence
  D35A Mutant IFN-alpha 2b
CDLPQTHSLGSRRTLMLLAQMRRISLFSCLKDRHAFGFPQEEFGNQFQKAETIPVLHEMIQQIFNLFSTKDSSAAWDETLLDKFYTELYQQLNDLEACVIQGVGVTETPLMKEDSILAVRKYFQRITLYLKEKKYSPCAWEVVRAEIMRSFSLSTNLQESLRSKE

SEQ ID NO: 29 - protein, 165 aa, Artificial Sequence
  G37A Mutant IFN-alpha 2b
CDLPQTHSLGSRRTLMLLAQMRRISLFSCLKDRHDFAFPQEEFGNQFQKAETIPVLHEMIQQIFNLFSTKDSSAAWDETLLDKFYTELYQQLNDLEACVIQGVGVTETPLMKEDSILAVRKYFQRITLYLKEKKYSPCAWEVVRAEIMRSFSLSTNLQESLRSKE

SEQ ID NO: 30 - protein, 165 aa, Artificial Sequence
  P39A Mutant IFN-alpha 2b
CDLPQTHSLGSRRTLMLLAQMRRISLFSCLKDRHDFGFAQEEFGNQFQKAETIPVLHEMIQQIFNLFSTKDSSAAWDETLLDKFYTELYQQLNDLEACVIQGVGVTETPLMKEDSILAVRKYFQRITLYLKEKKYSPCAWEVVRAEIMRSFSLSTNLQESLRSKE

SEQ ID NO: 31 - protein, 165 aa, Artificial Sequence
  E41A Mutant IFN-alpha 2b
CDLPQTHSLGSRRTLMLLAQMRRISLFSCLKDRHDFGFPQAEFGNQFQKAETIPVLHEMIQQIFNLFSTKDSSAAWDETLLDKFYTELYQQLNDLEACVIQGVGVTETPLMKEDSILAVRKYFQRITLYLKEKKYSPCAWEVVRAEIMRSFSLSTNLQESLRSKE

SEQ ID NO: 32 - protein, 165 aa, Artificial Sequence
  E42A Mutant IFN-alpha 2b
CDLPQTHSLGSRRTLMLLAQMRRISLFSCLKDRHDFGFPQEAFGNQFQKAETIPVLHEMIQQIFNLFSTKDSSAAWDETLLDKFYTELYQQLNDLEACVIQGVGVTETPLMKEDSILAVRKYFQRITLYLKEKKYSPCAWEVVRAEIMRSFSLSTNLQESLRSKE

SEQ ID NO: 33 - protein, 165 aa, Artificial Sequence
  F43A Mutant IFN-alpha 2b
CDLPQTHSLGSRRTLMLLAQMRRISLFSCLKDRHDFGFPQEEAGNQFQKAETIPVLHEMIQQIFNLFSTKDSSAAWDETLLDKFYTELYQQLNDLEACVIQGVGVTETPLMKEDSILAVRKYFQRITLYLKEKKYSPCAWEVVRAEIMRSFSLSTNLQESLRSKE

SEQ ID NO: 34 - protein, 165 aa, Artificial Sequence
  N45A Mutant IFN-alpha 2b
CDLPQTHSLGSRRTLMLLAQMRRISLFSCLKDRHDFGFPQEEFGAQFQKAETIPVLHEMIQQIFNLFSTKDSSAAWDETLLDKFYTELYQQLNDLEACVIQGVGVTETPLMKEDSILAVRKYFQRITLYLKEKKYSPCAWEVVRAEIMRSFSLSTNLQESLRSKE

SEQ ID NO: 35 - protein, 165 aa, Artificial Sequence
  F47A Mutant IFN-alpha 2b
CDLPQTHSLGSRRTLMLLAQMRRISLFSCLKDRHDFGFPQEEFGNQAQKAETIPVLHEMIQQIFNLFSTKDSSAAWDETLLDKFYTELYQQLNDLEACVIQGVGVTETPLMKEDSILAVRKYFQRITLYLKEKKYSPCAWEVVRAEIMRSFSLSTNLQESLRSKE

SEQ ID NO: 36 - protein, 165 aa, Artificial Sequence
  E51A Mutant IFN-alpha 2b
CDLPQTHSLGSRRTLMLLAQMRRISLFSCLKDRHDFGFPQEEFGNQFQKAATIPVLHEMIQQIFNLFSTKDSSAAWDETLLDKFYTELYQQLNDLEACVIQGVGVTETPLMKEDSILAVRKYFQRITLYLKEKKYSPCAWEVVRAEIMRSFSLSTNLQESLRSKE

SEQ ID NO: 37 - protein, 165 aa, Artificial Sequence
  T52A Mutant IFN-alpha 2b
CDLPQTHSLGSRRTLMLLAQMRRISLFSCLKDRHDFGFPQEEFGNQFQKAEAIPVLHEMIQQIFNLFSTKDSSAAWDETLLDKFYTELYQQLNDLEACVIQGVGVTETPLMKEDSILAVRKYFQRITLYLKEKKYSPCAWEVVRAEIMRSFSLSTNLQESLRSKE

SEQ ID NO: 38 - protein, 165 aa, Artificial Sequence
  I53A Mutant IFN-alpha 2b
CDLPQTHSLGSRRTLMLLAQMRRISLFSCLKDRHDFGFPQEEFGNQFQKAETAPVLHEMIQQIFNLFSTKDSSAAWDETLLDKFYTELYQQLNDLEACVIQGVGVTETPLMKEDSILAVRKYFQRITLYLKEKKYSPCAWEVVRAEIMRSFSLSTNLQESLRSKE

SEQ ID NO: 39 - protein, 165 aa, Artificial Sequence
  P54A Mutant IFN-alpha 2b
CDLPQTHSLGSRRTLMLLAQMRRISLFSCLKDRHDFGFPQEEFGNQFQKAETIAVLHEMIQQIFNLFSTKDSSAAWDETLLDKFYTELYQQLNDLEACVIQGVGVTETPLMKEDSILAVRKYFQRITLYLKEKKYSPCAWEVVRAEIMRSFSLSTNLQESLRSKE

SEQ ID NO: 40 - protein, 165 aa, Artificial Sequence
  V55A Mutant IFN-alpha 2b
CDLPQTHSLGSRRTLMLLAQMRRISLFSCLKDRHDFGFPQEEFGNQFQKAETIPALHEMIQQIFNLFSTKDSSAAWDETLLDKFYTELYQQLNDLEACVIQGVGVTETPLMKEDSILAVRKYFQRITLYLKEKKYSPCAWEVVRAEIMRSFSLSTNLQESLRSKE

SEQ ID NO: 41 - protein, 165 aa, Artificial Sequence
  L56A Mutant IFN-alpha 2b
CDLPQTHSLGSRRTLMLLAQMRRISLFSCLKDRHDFGFPQEEFGNQFQKAETIPVAHEMIQQIFNLFSTKDSSAAWDETLLDKFYTELYQQLNDLEACVIQGVGVTETPLMKEDSILAVRKYFQRITLYLKEKKYSPCAWEVVRAEIMRSFSLSTNLQESLRSKE

SEQ ID NO: 42 - protein, 165 aa, Artificial Sequence
  H57A Mutant IFN-alpha 2b
CDLPQTHSLGSRRTLMLLAQMRRISLFSCLKDRHDFGFPQEEFGNQFQKAETIPVLAEMIQQIFNLFSTKDSSAAWDETLLDKFYTELYQQLNDLEACVIQGVGVTETPLMKEDSILAVRKYFQRITLYLKEKKYSPCAWEVVRAEIMRSFSLSTNLQESLRSKE

SEQ ID NO: 43 - protein, 165 aa, Artificial Sequence
  E58A Mutant IFN-alpha 2b
CDLPQTHSLGSRRTLMLLAQMRRISLFSCLKDRHDFGFPQEEFGNQFQKAETIPVLHAMIQQIFNLFSTKDSSAAWDETLLDKFYTELYQQLNDLEACVIQGVGVTETPLMKEDSILAVRKYFQRITLYLKEKKYSPCAWEVVRAEIMRSFSLSTNLQESLRSKE

SEQ ID NO: 44 - protein, 165 aa, Artificial Sequence
  M59A Mutant IFN-alpha 2b
CDLPQTHSLGSRRTLMLLAQMRRISLFSCLKDRHDFGFPQEEFGNQFQKAETIPVLHEAIQQIFNLFSTKDSSAAWDETLLDKFYTELYQQLNDLEACVIQGVGVTETPLMKEDSILAVRKYFQRITLYLKEKKYSPCAWEVVRAEIMRSFSLSTNLQESLRSKE

SEQ ID NO: 45 - protein, 165 aa, Artificial Sequence
  I60A Mutant IFN-alpha 2b
CDLPQTHSLGSRRTLMLLAQMRRISLFSCLKDRHDFGFPQEEFGNQFQKAETIPVLHEMAQQIFNLFSTKDSSAAWDETLLDKFYTELYQQLNDLEACVIQGVGVTETPLMKEDSILAVRKYFQRITLYLKEKKYSPCAWEVVRAEIMRSFSLSTNLQESLRSKE

SEQ ID NO: 46 - protein, 165 aa, Artificial Sequence
  I63A Mutant IFN-alpha 2b
CDLPQTHSLGSRRTLMLLAQMRRISLFSCLKDRHDFGFPQEEFGNQFQKAETIPVLHEMIQQAFNLFSTKDSSAAWDETLLDKFYTELYQQLNDLEACVIQGVGVTETPLMKEDSILAVRKYFQRITLYLKEKKYSPCAWEVVRAEIMRSFSLSTNLQESLRSKE

SEQ ID NO: 47 - protein, 165 aa, Artificial Sequence
  F64A Mutant IFN-alpha 2b
CDLPQTHSLGSRRTLMLLAQMRRISLFSCLKDRHDFGFPQEEFGNQFQKAETIPVLHEMIQQIANLFSTKDSSAAWDETLLDKFYTELYQQLNDLEACVIQGVGVTETPLMKEDSILAVRKYFQRITLYLKEKKYSPCAWEVVRAEIMRSFSLSTNLQESLRSKE

SEQ ID NO: 48 - protein, 165 aa, Artificial Sequence
  N65A Mutant IFN-alpha 2b
CDLPQTHSLGSRRTLMLLAQMRRISLFSCLKDRHDFGFPQEEFGNQFQKAETIPVLHEMIQQIFALFSTKDSSAAWDETLLDKFYTELYQQLNDLEACVIQGVGVTETPLMKEDSILAVRKYFQRITLYLKEKKYSPCAWEVVRAEIMRSFSLSTNLQESLRSKE

SEQ ID NO: 49 - protein, 165 aa, Artificial Sequence
  L66A Mutant IFN-alpha 2b
CDLPQTHSLGSRRTLMLLAQMRRISLFSCLKDRHDFGFPQEEFGNQFQKAETIPVLHEMIQQIFNAFSTKDSSAAWDETLLDKFYTELYQQLNDLEACVIQGVGVTETPLMKEDSILAVRKYFQRITLYLKEKKYSPCAWEVVRAEIMRSFSLSTNLQESLRSKE

SEQ ID NO: 50 - protein, 165 aa, Artificial Sequence
  F67A Mutant IFN-alpha 2b
CDLPQTHSLGSRRTLMLLAQMRRISLFSCLKDRHDFGFPQEEFGNQFQKAETIPVLHEMIQQIFNLASTKDSSAAWDETLLDKFYTELYQQLNDLEACVIQGVGVTETPLMKEDSILAVRKYFQRITLYLKEKKYSPCAWEVVRAEIMRSFSLSTNLQESLRSKE

SEQ ID NO: 51 - protein, 165 aa, Artificial Sequence
  T69A Mutant IFN-alpha 2b
CDLPQTHSLGSRRTLMLLAQMRRISLFSCLKDRHDFGFPQEEFGNQFQKAETIPVLHEMIQQIFNLFSAKDSSAAWDETLLDKFYTELYQQLNDLEACVIQGVGVTETPLMKEDSILAVRKYFQRITLYLKEKKYSPCAWEVVRAEIMRSFSLSTNLQESLRSKE

SEQ ID NO: 52 - protein, 165 aa, Artificial Sequence
  K70A Mutant IFN-alpha 2b
CDLPQTHSLGSRRTLMLLAQMRRISLFSCLKDRHDFGFPQEEFGNQFQKAETIPVLHEMIQQIFNLFSTADSSAAWDETLLDKFYTELYQQLNDLEACVIQGVGVTETPLMKEDSILAVRKYFQRITLYLKEKKYSPCAWEVVRAEIMRSFSLSTNLQESLRSKE

SEQ ID NO: 53 - protein, 165 aa, Artificial Sequence
  D71A Mutant IFN-alpha 2b
CDLPQTHSLGSRRTLMLLAQMRRISLFSCLKDRHDFGFPQEEFGNQFQKAETIPVLHEMIQQIFNLFSTKASSAAWDETLLDKFYTELYQQLNDLEACVIQGVGVTETPLMKEDSILAVRKYFQRITLYLKEKKYSPCAWEVVRAEIMRSFSLSTNLQESLRSKE

SEQ ID NO: 54 - protein, 165 aa, Artificial Sequence
  S72A Mutant IFN-alpha 2b
CDLPQTHSLGSRRTLMLLAQMRRISLFSCLKDRHDFGFPQEEFGNQFQKAETIPVLHEMIQQIFNLFSTKDASAAWDETLLDKFYTELYQQLNDLEACVIQGVGVTETPLMKEDSILAVRKYFQRITLYLKEKKYSPCAWEVVRAEIMRSFSLSTNLQESLRSKE

SEQ ID NO: 55 - protein, 165 aa, Artificial Sequence
  W76A Mutant IFN-alpha 2b
CDLPQTHSLGSRRTLMLLAQMRRISLFSCLKDRHDFGFPQEEFGNQFQKAETIPVLHEMIQQIFNLFSTKDSSAAADETLLDKFYTELYQQLNDLEACVIQGVGVTETPLMKEDSILAVRKYFQRITLYLKEKKYSPCAWEVVRAEIMRSFSLSTNLQESLRSKE

SEQ ID NO: 56 - protein, 165 aa, Artificial Sequence
  D77A Mutant IFN-alpha 2b
CDLPQTHSLGSRRTLMLLAQMRRISLFSCLKDRHDFGFPQEEFGNQFQKAETIPVLHEMIQQIFNLFSTKDSSAAWAETLLDKFYTELYQQLNDLEACVIQGVGVTETPLMKEDSILAVRKYFQRITLYLKEKKYSPCAWEVVRAEIMRSFSLSTNLQESLRSKE

SEQ ID NO: 57 - protein, 165 aa, Artificial Sequence
  E78A Mutant IFN-alpha 2b
CDLPQTHSLGSRRTLMLLAQMRRISLFSCLKDRHDFGFPQEEFGNQFQKAETIPVLHEMIQQIFNLFSTKDSSAAWDATLLDKFYTELYQQLNDLEACVIQGVGVTETPLMKEDSILAVRKYFQRITLYLKEKKYSPCAWEVVRAEIMRSFSLSTNLQESLRSKE

SEQ ID NO: 58 - protein, 165 aa, Artificial Sequence
  L81A Mutant IFN-alpha 2b
CDLPQTHSLGSRRTLMLLAQMRRISLFSCLKDRHDFGFPQEEFGNQFQKAETIPVLHEMIQQIFNLFSTKDSSAAWDETLADKFYTELYQQLNDLEACVIQGVGVTETPLMKEDSILAVRKYFQRITLYLKEKKYSPCAWEVVRAEIMRSFSLSTNLQESLRSKE

SEQ ID NO: 59 - protein, 165 aa, Artificial Sequence
  D82A Mutant IFN-alpha 2b
CDLPQTHSLGSRRTLMLLAQMRRISLFSCLKDRHDFGFPQEEFGNQFQKAETIPVLHEMIQQIFNLFSTKDSSAAWDETLLAKFYTELYQQLNDLEACVIQGVGVTETPLMKEDSILAVRKYFQRITLYLKEKKYSPCAWEVVRAEIMRSFSLSTNLQESLRSKE

SEQ ID NO: 60 - protein, 165 aa, Artificial Sequence
  K83A Mutant IFN-alpha 2b
CDLPQTHSLGSRRTLMLLAQMRRISLFSCLKDRHDFGFPQEEFGNQFQKAETIPVLHEMIQQIFNLFSTKDSSAAWDETLLDAFYTELYQQLNDLEACVIQGVGVTETPLMKEDSILAVRKYFQRITLYLKEKKYSPCAWEVVRAEIMRSFSLSTNLQESLRSKE

SEQ ID NO: 61 - protein, 165 aa, Artificial Sequence
  F84A Mutant IFN-alpha 2b
CDLPQTHSLGSRRTLMLLAQMRRISLFSCLKDRHDFGFPQEEFGNQFQKAETIPVLHEMIQQIFNLFSTKDSSAAWDETLLDKAYTELYQQLNDLEACVIQGVGVTETPLMKEDSILAVRKYFQRITLYLKEKKYSPCAWEVVRAEIMRSFSLSTNLQESLRSKE

SEQ ID NO: 62 - protein, 165 aa, Artificial Sequence
  Y85A Mutant IFN-alpha 2b
CDLPQTHSLGSRRTLMLLAQMRRISLFSCLKDRHDFGFPQEEFGNQFQKAETIPVLHEMIQQIFNLFSTKDSSAAWDETLLDKFATELYQQLNDLEACVIQGVGVTETPLMKEDSILAVRKYFQRITLYLKEKKYSPCAWEVVRAEIMRSFSLSTNLQESLRSKE

SEQ ID NO: 63 - protein, 165 aa, Artificial Sequence
  Y89A Mutant IFN-alpha 2b
CDLPQTHSLGSRRTLMLLAQMRRISLFSCLKDRHDFGFPQEEFGNQFQKAETIPVLHEMIQQIFNLFSTKDSSAAWDETLLDKFYTELAQQLNDLEACVIQGVGVTETPLMKEDSILAVRKYFQRITLYLKEKKYSPCAWEVVRAEIMRSFSLSTNLQESLRSKE

SEQ ID NO: 64 - protein, 165 aa, Artificial Sequence
  Q90A Mutant IFN-alpha 2b
CDLPQTHSLGSRRTLMLLAQMRRISLFSCLKDRHDFGFPQEEFGNQFQKAETIPVLHEMIQQIFNLFSTKDSSAAWDETLLDKFYTELYAQLNDLEACVIQGVGVTETPLMKEDSILAVRKYFQRITLYLKEKKYSPCAWEVVRAEIMRSFSLSTNLQESLRSKE

SEQ ID NO: 65 - protein, 165 aa, Artificial Sequence
  Q91A Mutant IFN-alpha 2b
CDLPQTHSLGSRRTLMLLAQMRRISLFSCLKDRHDFGFPQEEFGNQFQKAETIPVLHEMIQQIFNLFSTKDSSAAWDETLLDKFYTELYQALNDLEACVIQGVGVTETPLMKEDSILAVRKYFQRITLYLKEKKYSPCAWEVVRAEIMRSFSLSTNLQESLRSKE

SEQ ID NO: 66 - protein, 165 aa, Artificial Sequence
  N93A Mutant IFN-alpha 2b
CDLPQTHSLGSRRTLMLLAQMRRISLFSCLKDRHDFGFPQEEFGNQFQKAETIPVLHEMIQQIFNLFSTKDSSAAWDETLLDKFYTELYQQLADLEACVIQGVGVTETPLMKEDSILAVRKYFQRITLYLKEKKYSPCAWEVVRAEIMRSFSLSTNLQESLRSKE

SEQ ID NO: 67 - protein, 165 aa, Artificial Sequence
  D94A Mutant IFN-alpha 2b
CDLPQTHSLGSRRTLMLLAQMRRISLFSCLKDRHDFGFPQEEFGNQFQKAETIPVLHEMIQQIFNLFSTKDSSAAWDETLLDKFYTELYQQLNALEACVIQGVGVTETPLMKEDSILAVRKYFQRITLYLKEKKYSPCAWEVVRAEIMRSFSLSTNLQESLRSKE

SEQ ID NO: 68 - protein, 165 aa, Artificial Sequence
  C98A Mutant IFN-alpha 2b
CDLPQTHSLGSRRTLMLLAQMRRISLFSCLKDRHDFGFPQEEFGNQFQKAETIPVLHEMIQQIFNLFSTKDSSAAWDETLLDKFYTELYQQLNDLEAAVIQGVGVTETPLMKEDSILAVRKYFQRITLYLKEKKYSPCAWEVVRAEIMRSFSLSTNLQESLRSKE

SEQ ID NO: 69 - protein, 165 aa, Artificial Sequence
  V99A Mutant IFN-alpha 2b
CDLPQTHSLGSRRTLMLLAQMRRISLFSCLKDRHDFGFPQEEFGNQFQKAETIPVLHEMIQQIFNLFSTKDSSAAWDETLLDKFYTELYQQLNDLEACAIQGVGVTETPLMKEDSILAVRKYFQRITLYLKEKKYSPCAWEVVRAEIMRSFSLSTNLQESLRSKE

SEQ ID NO: 70 - protein, 165 aa, Artificial Sequence
  G104A Mutant IFN-alpha 2b
CDLPQTHSLGSRRTLMLLAQMRRISLFSCLKDRHDFGFPQEEFGNQFQKAETIPVLHEMIQQIFNLFSTKDSSAAWDETLLDKFYTELYQQLNDLEACVIQGVAVTETPLMKEDSILAVRKYFQRITLYLKEKKYSPCAWEVVRAEIMRSFSLSTNLQESLRSKE

SEQ ID NO: 71 - protein, 165 aa, Artificial Sequence
  L110A Mutant IFN-alpha 2b
CDLPQTHSLGSRRTLMLLAQMRRISLFSCLKDRHDFGFPQEEFGNQFQKAETIPVLHEMIQQIFNLFSTKDSSAAWDETLLDKFYTELYQQLNDLEACVIQGVGVTETPAMKEDSILAVRKYFQRITLYLKEKKYSPCAWEVVRAEIMRSFSLSTNLQESLRSKE

SEQ ID NO: 72 - protein, 165 aa, Artificial Sequence
  S115A Mutant IFN-alpha 2b
CDLPQTHSLGSRRTLMLLAQMRRISLFSCLKDRHDFGFPQEEFGNQFQKAETIPVLHEMIQQIFNLFSTKDSSAAWDETLLDKFYTELYQQLNDLEACVIQGVGVTETPLMKEDAILAVRKYFQRITLYLKEKKYSPCAWEVVRAEIMRSFSLSTNLQESLRSKE

SEQ ID NO: 73 - protein, 165 aa, Artificial Sequence
  Y122A Mutant IFN-alpha 2b
CDLPQTHSLGSRRTLMLLAQMRRISLFSCLKDRHDFGFPQEEFGNQFQKAETIPVLHEMIQQIFNLFSTKDSSAAWDETLLDKFYTELYQQLNDLEACVIQGVGVTETPLMKEDSILAVRKAFQRITLYLKEKKYSPCAWEVVRAEIMRSFSLSTNLQESLRSKE

SEQ ID NO: 74 - protein, 165 aa, Artificial Sequence
  W140A Mutant IFN-alpha 2b
CDLPQTHSLGSRRTLMLLAQMRRISLFSCLKDRHDFGFPQEEFGNQFQKAETIPVLHEMIQQIFNLFSTKDSSAAWDETLLDKFYTELYQQLNDLEACVIQGVGVTETPLMKEDSILAVRKYFQRITLYLKEKKYSPCAAEVVRAEIMRSFSLSTNLQESLRSKE

SEQ ID NO: 75 - protein, 165 aa, Artificial Sequence
  E146A Mutant IFN-alpha 2b
CDLPQTHSLGSRRTLMLLAQMRRISLFSCLKDRHDFGFPQEEFGNQFQKAETIPVLHEMIQQIFNLFSTKDSSAAWDETLLDKFYTELYQQLNDLEACVIQGVGVTETPLMKEDSILAVRKYFQRITLYLKEKKYSPCAWEVVRAAIMRSFSLSTNLQESLRSKE

SEQ ID NO: 76 - protein, 165 aa, Artificial Sequence
  L3V Mutant IFN-alpha 2b
CDVPQTHSLGSRRTLMLLAQMRRISLFSCLKDRHDFGFPQEEFGNQFQKAETIPVLHEMIQQIFNLFSTKDSSAAWDETLLDKFYTELYQQLNDLEACVIQGVGVTETPLMKEDSILAVRKYFQRITLYLKEKKYSPCAWEVVRAEIMRSFSLSTNLQESLRSKE

SEQ ID NO: 77 - protein, 165 aa, Artificial Sequence
  R12H Mutant IFN-alpha 2b
CDLPQTHSLGSHRTLMLLAQMRRISLFSCLKDRHDFGFPQEEFGNQFQKAETIPVLHEMIQQIFNLFSTKDSSAAWDETLLDKFYTELYQQLNDLEACVIQGVGVTETPLMKEDSILAVRKYFQRITLYLKEKKYSPCAWEVVRAEIMRSFSLSTNLQESLRSKE

SEQ ID NO: 78 - protein, 165 aa, Artificial Sequence
  R13H Mutant IFN-alpha 2b
CDLPQTHSLGSRHTLMLLAQMRRISLFSCLKDRHDFGFPQEEFGNQFQKAETIPVLHEMIQQIFNLFSTKDSSAAWDETLLDKFYTELYQQLNDLEACVIQGVGVTETPLMKEDSILAVRKYFQRITLYLKEKKYSPCAWEVVRAEIMRSFSLSTNLQESLRSKE

SEQ ID NO: 79 - protein, 165 aa, Artificial Sequence
  M16V Mutant IFN-alpha 2b
CDLPQTHSLGSRRTLVLLAQMRRISLFSCLKDRHDFGFPQEEFGNQFQKAETIPVLHEMIQQIFNLFSTKDSSAAWDETLLDKFYTELYQQLNDLEACVIQGVGVTETPLMKEDSILAVRKYFQRITLYLKEKKYSPCAWEVVRAEIMRSFSLSTNLQESLRSKE

SEQ ID NO: 80 - protein, 165 aa, Artificial Sequence
  M16I Mutant IFN-alpha 2b
CDLPQTHSLGSRRTLILLAQMRRISLFSCLKDRHDFGFPQEEFGNQFQKAETIPVLHEMIQQIFNLFSTKDSSAAWDETLLDKFYTELYQQLNDLEACVIQGVGVTETPLMKEDSILAVRKYFQRITLYLKEKKYSPCAWEVVRAEIMRSFSLSTNLQESLRSKE

SEQ ID NO: 81 - protein, 165 aa, Artificial Sequence
  R22H Mutant IFN-alpha 2b
CDLPQTHSLGSRRTLMLLAQMHRISLFSCLKDRHDFGFPQEEFGNQFQKAETIPVLHEMIQQIFNLFSTKDSSAAWDETLLDKFYTELYQQLNDLEACVIQGVGVTETPLMKEDSILAVRKYFQRITLYLKEKKYSPCAWEVVRAEIMRSFSLSTNLQESLRSKE

SEQ ID NO: 82 - protein, 165 aa, Artificial Sequence
  F27I Mutant IFN-alpha 2b
CDLPQTHSLGSRRTLMLLAQMRRISLISCLKDRHDFGFPQEEFGNQFQKAETIPVLHEMIQQIFNLFSTKDSSAAWDETLLDKFYTELYQQLNDLEACVIQGVGVTETPLMKEDSILAVRKYFQRITLYLKEKKYSPCAWEVVRAEIMRSFSLSTNLQESLRSKE

SEQ ID NO: 83 - protein, 165 aa, Artificial Sequence
  F27V Mutant IFN-alpha 2b
CDLPQTHSLGSRRTLMLLAQMRRISLVSCLKDRHDFGFPQEEFGNQFQKAETIPVLHEMIQQIFNLFSTKDSSAAWDETLLDKFYTELYQQLNDLEACVIQGVGVTETPLMKEDSILAVRKYFQRITLYLKEKKYSPCAWEVVRAEIMRSFSLSTNLQESLRSKE

SEQ ID NO: 84 - protein, 165 aa, Artificial Sequence
  L30I Mutant IFN-alpha 2b
CDLPQTHSLGSRRTLMLLAQMRRISLFSCIKDRHDFGFPQEEFGNQFQKAETIPVLHEMIQQIFNLFSTKDSSAAWDETLLDKFYTELYQQLNDLEACVIQGVGVTETPLMKEDSILAVRKYFQRITLYLKEKKYSPCAWEVVRAEIMRSFSLSTNLQESLRSKE

SEQ ID NO: 85 - protein, 165 aa, Artificial Sequence
  K31Q Mutant IFN-alpha 2b
CDLPQTHSLGSRRTLMLLAQMRRISLFSCLQDRHDFGFPQEEFGNQFQKAETIPVLHEMIQQIFNLFSTKDSSAAWDETLLDKFYTELYQQLNDLEACVIQGVGVTETPLMKEDSILAVRKYFQRITLYLKEKKYSPCAWEVVRAEIMRSFSLSTNLQESLRSKE

SEQ ID NO: 86 - protein, 165 aa, Artificial Sequence
  R33H Mutant IFN-alpha 2b
CDLPQTHSLGSRRTLMLLAQMRRISLFSCLKDHHDFGFPQEEFGNQFQKAETIPVLHEMIQQIFNLFSTKDSSAAWDETLLDKFYTELYQQLNDLEACVIQGVGVTETPLMKEDSILAVRKYFQRITLYLKEKKYSPCAWEVVRAEIMRSFSLSTNLQESLRSKE

SEQ ID NO: 87 - protein, 165 aa, Artificial Sequence
  E41Q Mutant IFN-alpha 2b
CDLPQTHSLGSRRTLMLLAQMRRISLFSCLKDRHDFGFPQQEFGNQFQKAETIPVLHEMIQQIFNLFSTKDSSAAWDETLLDKFYTELYQQLNDLEACVIQGVGVTETPLMKEDSILAVRKYFQRITLYLKEKKYSPCAWEVVRAEIMRSFSLSTNLQESLRSKE

SEQ ID NO: 88 - protein, 165 aa, Artificial Sequence
  E41H Mutant IFN-alpha 2b
CDLPQTHSLGSRRTLMLLAQMRRISLFSCLKDRHDFGFPQHEFGNQFQKAETIPVLHEMIQQIFNLFSTKDSSAAWDETLLDKFYTELYQQLNDLEACVIQGVGVTETPLMKEDSILAVRKYFQRITLYLKEKKYSPCAWEVVRAEIMRSFSLSTNLQESLRSKE

SEQ ID NO: 89 - protein, 165 aa, Artificial Sequence
  E58Q Mutant IFN-alpha 2b
CDLPQTHSLGSRRTLMLLAQMRRISLFSCLKDRHDFGFPQEEFGNQFQKAETIPVLHQMIQQIFNLFSTKDSSAAWDETLLDKFYTELYQQLNDLEACVIQGVGVTETPLMKEDSILAVRKYFQRITLYLKEKKYSPCAWEVVRAEIMRSFSLSTNLQESLRSKE

SEQ ID NO: 90 - protein, 165 aa, Artificial Sequence
  E58H Mutant IFN-alpha 2b
CDLPQTHSLGSRRTLMLLAQMRRISLFSCLKDRHDFGFPQEEFGNQFQKAETIPVLHHMIQQIFNLFSTKDSSAAWDETLLDKFYTELYQQLNDLEACVIQGVGVTETPLMKEDSILAVRKYFQRITLYLKEKKYSPCAWEVVRAEIMRSFSLSTNLQESLRSKE

SEQ ID NO: 91 - protein, 165 aa, Artificial Sequence
  K70T Mutant IFN-alpha 2b
CDLPQTHSLGSRRTLMLLAQMRRISLFSCLKDRHDFGFPQEEFGNQFQKAETIPVLHEMIQQIFNLFSTTDSSAAWDETLLDKFYTELYQQLNDLEACVIQGVGVTETPLMKEDSILAVRKYFQRITLYLKEKKYSPCAWEVVRAEIMRSFSLSTNLQESLRSKE

SEQ ID NO: 92 - protein, 165 aa, Artificial Sequence
  E78Q Mutant IFN-alpha 2b
CDLPQTHSLGSRRTLMLLAQMRRISLFSCLKDRHDFGFPQEEFGNQFQKAETIPVLHEMIQQIFNLFSTKDSSAAWDQTLLDKFYTELYQQLNDLEACVIQGVGVTETPLMKEDSILAVRKYFQRITLYLKEKKYSPCAWEVVRAEIMRSFSLSTNLQESLRSKE

SEQ ID NO: 93 - protein, 165 aa, Artificial Sequence
  E78H Mutant IFN-alpha 2b
CDLPQTHSLGSRRTLMLLAQMRRISLFSCLKDRHDFGFPQEEFGNQFQKAETIPVLHEMIQQIFNLFSTKDSSAAWDHTLLDKFYTELYQQLNDLEACVIQGVGVTETPLMKEDSILAVRKYFQRITLYLKEKKYSPCAWEVVRAEIMRSFSLSTNLQESLRSKE

SEQ ID NO: 94 - protein, 165 aa, Artificial Sequence
  Y89I Mutant IFN-alpha 2b
CDLPQTHSLGSRRTLMLLAQMRRISLFSCLKDRHDFGFPQEEFGNQFQKAETIPVLHEMIQQIFNLFSTKDSSAAWDETLLDKFYTELIQQLNDLEACVIQGVGVTETPLMKEDSILAVRKYFQRITLYLKEKKYSPCAWEVVRAEIMRSFSLSTNLQESLRSKE

SEQ ID NO: 95 - protein, 165 aa, Artificial Sequence
  E107Q Mutant IFN-alpha 2b
CDLPQTHSLGSRRTLMLLAQMRRISLFSCLKDRHDFGFPQEEFGNQFQKAETIPVLHEMIQQIFNLFSTKDSSAAWDETLLDKFYTELYQQLNDLEACVIQGVGVTQTPLMKEDSILAVRKYFQRITLYLKEKKYSPCAWEVVRAEIMRSFSLSTNLQESLRSKE

SEQ ID NO: 96 - protein, 165 aa, Artificial Sequence
  E107H Mutant IFN-alpha 2b
CDLPQTHSLGSRRTLMLLAQMRRISLFSCLKDRHDFGFPQEEFGNQFQKAETIPVLHEMIQQIFNLFSTKDSSAAWDETLLDKFYTELYQQLNDLEACVIQGVGVTHTPLMKEDSILAVRKYFQRITLYLKEKKYSPCAWEVVRAEIMRSFSLSTNLQESLRSKE

SEQ ID NO: 97 - protein, 165 aa, Artificial Sequence
  P109A Mutant IFN-alpha 2b
CDLPQTHSLGSRRTLMLLAQMRRISLFSCLKDRHDFGFPQEEFGNQFQKAETIPVLHEMIQQIFNLFSTKDSSAAWDETLLDKFYTELYQQLNDLEACVIQGVGVTETALMKEDSILAVRKYFQRITLYLKEKKYSPCAWEVVRAEIMRSFSLSTNLQESLRSKE

SEQ ID NO: 98 - protein, 165 aa, Artificial Sequence
  L110V Mutant IFN-alpha 2b
CDLPQTHSLGSRRTLMLLAQMRRISLFSCLKDRHDFGFPQEEFGNQFQKAETIPVLHEMIQQIFNLFSTKDSSAAWDETLLDKFYTELYQQLNDLEACVIQGVGVTETPVMKEDSILAVRKYFQRITLYLKEKKYSPCAWEVVRAEIMRSFSLSTNLQESLRSKE

SEQ ID NO: 99 - protein, 165 aa, Artificial Sequence
  M111I Mutant IFN-alpha 2b
CDLPQTHSLGSRRTLMLLAQMRRISLFSCLKDRHDFGFPQEEFGNQFQKAETIPVLHEMIQQIFNLFSTKDSSAAWDETLLDKFYTELYQQLNDLEACVIQGVGVTETPLIKEDSILAVRKYFQRITLYLKEKKYSPCAWEVVRAEIMRSFSLSTNLQESLRSKE

SEQ ID NO: 100 - protein, 165 aa, Artificial Sequence
  E113Q Mutant IFN-alpha 2b
CDLPQTHSLGSRRTLMLLAQMRRISLFSCLKDRHDFGFPQEEFGNQFQKAETIPVLHEMIQQIFNLFSTKDSSAAWDETLLDKFYTELYQQLNDLEACVIQGVGVTETPLMKQDSILAVRKYFQRITLYLKEKKYSPCAWEVVRAEIMRSFSLSTNLQESLRSKE

SEQ ID NO: 101 - protein, 165 aa, Artificial Sequence
  E113H Mutant IFN-alpha 2b
CDLPQTHSLGSRRTLMLLAQMRRISLFSCLKDRHDFGFPQEEFGNQFQKAETIPVLHEMIQQIFNLFSTKDSSAAWDETLLDKFYTELYQQLNDLEACVIQGVGVTETPLMKHDSILAVRKYFQRITLYLKEKKYSPCAWEVVRAEIMRSFSLSTNLQESLRSKE

SEQ ID NO: 102 - protein, 165 aa, Artificial Sequence
  L117V Mutant IFN-alpha 2b
CDLPQTHSLGSRRTLMLLAQMRRISLFSCLKDRHDFGFPQEEFGNQFQKAETIPVLHEMIQQIFNLFSTKDSSAAWDETLLDKFYTELYQQLNDLEACVIQGVGVTETPLMKEDSIVAVRKYFQRITLYLKEKKYSPCAWEVVRAEIMRSFSLSTNLQESLRSKE

SEQ ID NO: 103 - protein, 165 aa, Artificial Sequence
  L117I Mutant IFN-alpha 2b
CDLPQTHSLGSRRTLMLLAQMRRISLFSCLKDRHDFGFPQEEFGNQFQKAETIPVLHEMIQQIFNLFSTKDSSAAWDETLLDKFYTELYQQLNDLEACVIQGVGVTETPLMKEDSIIAVRKYFQRITLYLKEKKYSPCAWEVVRAEIMRSFSLSTNLQESLRSKE

SEQ ID NO: 104 - protein, 165 aa, Artificial Sequence
  K121Q Mutant IFN-alpha 2b
CDLPQTHSLGSRRTLMLLAQMRRISLFSCLKDRHDFGFPQEEFGNQFQKAETIPVLHEMIQQIFNLFSTKDSSAAWDETLLDKFYTELYQQLNDLEACVIQGVGVTETPLMKEDSILAVRQYFQRITLYLKEKKYSPCAWEVVRAEIMRSFSLSTNLQESLRSKE

SEQ ID NO: 105 - protein, 165 aa, Artificial Sequence
  K121T Mutant IFN-alpha 2b
CDLPQTHSLGSRRTLMLLAQMRRISLFSCLKDRHDFGFPQEEFGNQFQKAETIPVLHEMIQQIFNLFSTKDSSAAWDETLLDKFYTELYQQLNDLEACVIQGVGVTETPLMKEDSILAVRTYFQRITLYLKEKKYSPCAWEVVRAEIMRSFSLSTNLQESLRSKE

SEQ ID NO: 106 - protein, 165 aa, Artificial Sequence
  R125H Mutant IFN-alpha 2b
CDLPQTHSLGSRRTLMLLAQMRRISLFSCLKDRHDFGFPQEEFGNQFQKAETIPVLHEMIQQIFNLFSTKDSSAAWDETLLDKFYTELYQQLNDLEACVIQGVGVTETPLMKEDSILAVRKYFQHITLYLKEKKYSPCAWEVVRAEIMRSFSLSTNLQESLRSKE

SEQ ID NO: 107 - protein, 165 aa, Artificial Sequence
  R125Q Mutant IFN-alpha 2b
CDLPQTHSLGSRRTLMLLAQMRRISLFSCLKDRHDFGFPQEEFGNQFQKAETIPVLHEMIQQIFNLFSTKDSSAAWDETLLDKFYTELYQQLNDLEACVIQGVGVTETPLMKEDSILAVRKYFQQITLYLKEKKYSPCAWEVVRAEIMRSFSLSTNLQESLRSKE

SEQ ID NO: 108 - protein, 165 aa, Artificial Sequence
  L128V Mutant IFN-alpha 2b
CDLPQTHSLGSRRTLMLLAQMRRISLFSCLKDRHDFGFPQEEFGNQFQKAETIPVLHEMIQQIFNLFSTKDSSAAWDETLLDKFYTELYQQLNDLEACVIQGVGVTETPLMKEDSILAVRKYFQRITVYLKEKKYSPCAWEVVRAEIMRSFSLSTNLQESLRSKE

SEQ ID NO: 109 - protein, 165 aa, Artificial Sequence
  L128I Mutant IFN-alpha 2b
CDLPQTHSLGSRRTLMLLAQMRRISLFSCLKDRHDFGFPQEEFGNQFQKAETIPVLHEMIQQIFNLFSTKDSSAAWDETLLDKFYTELYQQLNDLEACVIQGVGVTETPLMKEDSILAVRKYFQRITIYLKEKKYSPCAWEVVRAEIMRSFSLSTNLQESLRSKE

SEQ ID NO: 110 - protein, 165 aa, Artificial Sequence
  K131Q Mutant IFN-alpha 2b
CDLPQTHSLGSRRTLMLLAQMRRISLFSCLKDRHDFGFPQEEFGNQFQKAETIPVLHEMIQQIFNLFSTKDSSAAWDETLLDKFYTELYQQLNDLEACVIQGVGVTETPLMKEDSILAVRKYFQRITLYLQEKKYSPCAWEVVRAEIMRSFSLSTNLQESLRSKE

SEQ ID NO: 111 - protein, 165 aa, Artificial Sequence
  K131T Mutant IFN-alpha 2b
CDLPQTHSLGSRRTLMLLAQMRRISLFSCLKDRHDFGFPQEEFGNQFQKAETIPVLHEMIQQIFNLFSTKDSSAAWDETLLDKFYTELYQQLNDLEACVIQGVGVTETPLMKEDSILAVRKYFQRITLYLTEKKYSPCAWEVVRAEIMRSFSLSTNLQESLRSKE

SEQ ID NO: 112 - protein, 165 aa, Artificial Sequence
  E132Q Mutant IFN-alpha 2b
CDLPQTHSLGSRRTLMLLAQMRRISLFSCLKDRHDFGFPQEEFGNQFQKAETIPVLHEMIQQIFNLFSTKDSSAAWDETLLDKFYTELYQQLNDLEACVIQGVGVTETPLMKEDSILAVRKYFQRITLYLKQKKYSPCAWEVVRAEIMRSFSLSTNLQESLRSKE

SEQ ID NO: 113 - protein, 165 aa, Artificial Sequence
  E132H Mutant IFN-alpha 2b
CDLPQTHSLGSRRTLMLLAQMRRISLFSCLKDRHDFGFPQEEFGNQFQKAETIPVLHEMIQQIFNLFSTKDSSAAWDETLLDKFYTELYQQLNDLEACVIQGVGVTETPLMKEDSILAVRKYFQRITLYLKHKKYSPCAWEVVRAEIMRSFSLSTNLQESLRSKE

SEQ ID NO: 114 - protein, 165 aa, Artificial Sequence
  K133Q Mutant IFN-alpha 2b
CDLPQTHSLGSRRTLMLLAQMRRISLFSCLKDRHDFGFPQEEFGNQFQKAETIPVLHEMIQQIFNLFSTKDSSAAWDETLLDKFYTELYQQLNDLEACVIQGVGVTETPLMKEDSILAVRKYFQRITLYLKEQKYSPCAWEVVRAEIMRSFSLSTNLQESLRSKE

SEQ ID NO: 115 - protein, 165 aa, Artificial Sequence
  K133T Mutant IFN-alpha 2b
CDLPQTHSLGSRRTLMLLAQMRRISLFSCLKDRHDFGFPQEEFGNQFQKAETIPVLHEMIQQIFNLFSTKDSSAAWDETLLDKFYTELYQQLNDLEACVIQGVGVTETPLMKEDSILAVRKYFQRITLYLKETKYSPCAWEVVRAEIMRSFSLSTNLQESLRSKE

SEQ ID NO: 116 - protein, 165 aa, Artificial Sequence
  K134Q Mutant IFN-alpha 2b
CDLPQTHSLGSRRTLMLLAQMRRISLFSCLKDRHDFGFPQEEFGNQFQKAETIPVLHEMIQQIFNLFSTKDSSAAWDETLLDKFYTELYQQLNDLEACVIQGVGVTETPLMKEDSILAVRKYFQRITLYLKEKQYSPCAWEVVRAEIMRSFSLSTNLQESLRSKE

SEQ ID NO: 117 - protein, 165 aa, Artificial Sequence
  Y135H Mutant IFN-alpha 2b
CDLPQTHSLGSRRTLMLLAQMRRISLFSCLKDRHDFGFPQEEFGNQFQKAETIPVLHEMIQQIFNLFSTKDSSAAWDETLLDKFYTELYQQLNDLEACVIQGVGVTETPLMKEDSILAVRKYFQRITLYLKEKKHSPCAWEVVRAEIMRSFSLSTNLQESLRSKE

SEQ ID NO: 118 - protein, 165 aa, Artificial Sequence
  Y135I Mutant IFN-alpha 2b
CDLPQTHSLGSRRTLMLLAQMRRISLFSCLKDRHDFGFPQEEFGNQFQKAETIPVLHEMIQQIFNLFSTKDSSAAWDETLLDKFYTELYQQLNDLEACVIQGVGVTETPLMKEDSILAVRKYFQRITLYLKEKKISPCAWEVVRAEIMRSFSLSTNLQESLRSKE

SEQ ID NO: 119 - protein, 165 aa, Artificial Sequence
  P137A Mutant IFN-alpha 2b
CDLPQTHSLGSRRTLMLLAQMRRISLFSCLKDRHDFGFPQEEFGNQFQKAETIPVLHEMIQQIFNLFSTKDSSAAWDETLLDKFYTELYQQLNDLEACVIQGVGVTETPLMKEDSILAVRKYFQRITLYLKEKKYSACAWEVVRAEIMRSFSLSTNLQESLRSKE

SEQ ID NO: 120 - protein, 165 aa, Artificial Sequence
  M148V Mutant IFN-alpha 2b
CDLPQTHSLGSRRTLMLLAQMRRISLFSCLKDRHDFGFPQEEFGNQFQKAETIPVLHEMIQQIFNLFSTKDSSAAWDETLLDKFYTELYQQLNDLEACVIQGVGVTETPLMKEDSILAVRKYFQRITLYLKEKKYSPCAWEVVRAEIVRSFSLSTNLQESLRSKE

SEQ ID NO: 121 - protein, 165 aa, Artificial Sequence
  M148I Mutant IFN-alpha 2b
CDLPQTHSLGSRRTLMLLAQMRRISLFSCLKDRHDFGFPQEEFGNQFQKAETIPVLHEMIQQIFNLFSTKDSSAAWDETLLDKFYTELYQQLNDLEACVIQGVGVTETPLMKEDSILAVRKYFQRITLYLKEKKYSPCAWEVVRAEIIRSFSLSTNLQESLRSKE

SEQ ID NO: 122 - protein, 165 aa, Artificial Sequence
  R149H Mutant IFN-alpha 2b
CDLPQTHSLGSRRTLMLLAQMRRISLFSCLKDRHDFGFPQEEFGNQFQKAETIPVLHEMIQQIFNLFSTKDSSAAWDETLLDKFYTELYQQLNDLEACVIQGVGVTETPLMKEDSILAVRKYFQRITLYLKEKKYSPCAWEVVRAEIMHSFSLSTNLQESLRSKE

SEQ ID NO: 123 - protein, 165 aa, Artificial Sequence
  R149Q Mutant IFN-alpha 2b
CDLPQTHSLGSRRTLMLLAQMRRISLFSCLKDRHDFGFPQEEFGNQFQKAETIPVLHEMIQQIFNLFSTKDSSAAWDETLLDKFYTELYQQLNDLEACVIQGVGVTETPLMKEDSILAVRKYFQRITLYLKEKKYSPCAWEVVRAEIMQSFSLSTNLQESLRSKE

SEQ ID NO: 124 - protein, 165 aa, Artificial Sequence
  E159Q Mutant IFN-alpha 2b
CDLPQTHSLGSRRTLMLLAQMRRISLFSCLKDRHDFGFPQEEFGNQFQKAETIPVLHEMIQQIFNLFSTKDSSAAWDETLLDKFYTELYQQLNDLEACVIQGVGVTETPLMKEDSILAVRKYFQRITLYLKEKKYSPCAWEVVRAEIMRSFSLSTNLQQSLRSKE

SEQ ID NO: 125 - protein, 165 aa, Artificial Sequence
  E159H Mutant IFN-alpha 2b
CDLPQTHSLGSRRTLMLLAQMRRISLFSCLKDRHDFGFPQEEFGNQFQKAETIPVLHEMIQQIFNLFSTKDSSAAWDETLLDKFYTELYQQLNDLEACVIQGVGVTETPLMKEDSILAVRKYFQRITLYLKEKKYSPCAWEVVRAEIMRSFSLSTNLQHSLRSKE

SEQ ID NO: 126 - protein, 165 aa, Artificial Sequence
  P4S Mutant IFN-alpha 2b
CDLSQTHSLGSRRTLMLLAQMRRISLFSCLKDRHDFGFPQEEFGNQFQKAETIPVLHEMIQQIFNLFSTKDSSAAWDETLLDKFYTELYQQLNDLEACVIQGVGVTETPLMKEDSILAVRKYFQRITLYLKEKKYSPCAWEVVRAEIMRSFSLSTNLQESLRSKE

SEQ ID NO: 127 - protein, 165 aa, Artificial Sequence
  Q5N/H7S Mutant IFN-alpha 2b
CDLPNTSSLGSRRTLMLLAQMRRISLFSCLKDRHDFGFPQEEFGNQFQKAETIPVLHEMIQQIFNLFSTKDSSAAWDETLLDKFYTELYQQLNDLEACVIQGVGVTETPLMKEDSILAVRKYFQRITLYLKEKKYSPCAWEVVRAEIMRSFSLSTNLQESLRSKE

SEQ ID NO: 128 - protein, 165 aa, Artificial Sequence
  Q5N/H7T Mutant IFN-alpha 2b
CDLPNTTSLGSRRTLMLLAQMRRISLFSCLKDRHDFGFPQEEFGNQFQKAETIPVLHEMIQQIFNLFSTKDSSAAWDETLLDKFYTELYQQLNDLEACVIQGVGVTETPLMKEDSILAVRKYFQRITLYLKEKKYSPCAWEVVRAEIMRSFSLSTNLQESLRSKE

SEQ ID NO: 129 - protein, 165 aa, Artificial Sequence
  T6N/S8S Mutant IFN-alpha 2b
CDLPQNHSLGSRRTLMLLAQMRRISLFSCLKDRHDFGFPQEEFGNQFQKAETIPVLHEMIQQIFNLFSTKDSSAAWDETLLDKFYTELYQQLNDLEACVIQGVGVTETPLMKEDSILAVRKYFQRITLYLKEKKYSPCAWEVVRAEIMRSFSLSTNLQESLRSKE

SEQ ID NO: 130 - protein, 165 aa, Artificial Sequence
  S8N/G10S Mutant IFN-alpha 2b
CDLPQTHNLSSRRTLMLLAQMRRISLFSCLKDRHDFGFPQEEFGNQFQKAETIPVLHEMIQQIFNLFSTKDSSAAWDETLLDKFYTELYQQLNDLEACVIQGVGVTETPLMKEDSILAVRKYFQRITLYLKEKKYSPCAWEVVRAEIMRSFSLSTNLQESLRSKE

SEQ ID NO: 131 - protein, 165 aa, Artificial Sequence
  S8N/G10T Mutant IFN-alpha 2b
CDLPQTHNLTSRRTLMLLAQMRRISLFSCLKDRHDFGFPQEEFGNQFQKAETIPVLHEMIQQIFNLFSTKDSSAAWDETLLDKFYTELYQQLNDLEACVIQGVGVTETPLMKEDSILAVRKYFQRITLYLKEKKYSPCAWEVVRAEIMRSFSLSTNLQESLRSKE

SEQ ID NO: 132 - protein, 165 aa, Artificial Sequence
  M21N/R23S Mutant IFN-alpha 2b
CDLPQTHSLGSRRTLMLLAQNRSISLFSCLKDRHDFGFPQEEFGNQFQKAETIPVLHEMIQQIFNLFSTKDSSAAWDETLLDKFYTELYQQLNDLEACVIQGVGVTETPLMKEDSILAVRKYFQRITLYLKEKKYSPCAWEVVRAEIMRSFSLSTNLQESLRSKE

SEQ ID NO: 133 - protein, 165 aa, Artificial Sequence
  R23N/S25T Mutant IFN-alpha 2b
CDLPQTHSLGSRRTLMLLAQMRNITLFSCLKDRHDFGFPQEEFGNQFQKAETIPVLHEMIQQIFNLFSTKDSSAAWDETLLDKFYTELYQQLNDLEACVIQGVGVTETPLMKEDSILAVRKYFQRITLYLKEKKYSPCAWEVVRAEIMRSFSLSTNLQESLRSKE

SEQ ID NO: 134 - protein, 165 aa, Artificial Sequence
  I24N/L26S Mutant IFN-alpha 2b
CDLPQTHSLGSRRTLMLLAQMRRNSSFSCLKDRHDFGFPQEEFGNQFQKAETIPVLHEMIQQIFNLFSTKDSSAAWDETLLDKFYTELYQQLNDLEACVIQGVGVTETPLMKEDSILAVRKYFQRITLYLKEKKYSPCAWEVVRAEIMRSFSLSTNLQESLRSKE

SEQ ID NO: 135 - protein, 165 aa, Artificial Sequence
  S25N/F27S Mutant IFN-alpha 2b
CDLPQTHSLGSRRTLMLLAQMRRINLSSCLKDRHDFGFPQEEFGNQFQKAETIPVLHEMIQQIFNLFSTKDSSAAWDETLLDKFYTELYQQLNDLEACVIQGVGVTETPLMKEDSILAVRKYFQRITLYLKEKKYSPCAWEVVRAEIMRSFSLSTNLQESLRSKE

SEQ ID NO: 136 - protein, 165 aa, Artificial Sequence
  S25N/F27T Mutant IFN-alpha 2b
CDLPQTHSLGSRRTLMLLAQMRRINLTSCLKDRHDFGFPQEEFGNQFQKAETIPVLHEMIQQIFNLFSTKDSSAAWDETLLDKFYTELYQQLNDLEACVIQGVGVTETPLMKEDSILAVRKYFQRITLYLKEKKYSPCAWEVVRAEIMRSFSLSTNLQESLRSKE

SEQ ID NO: 137 - protein, 165 aa, Artificial Sequence
  L26N/S28S Mutant IFN-alpha 2b
CDLPQTHSLGSRRTLMLLAQMRRISNFSCLKDRHDFGFPQEEFGNQFQKAETIPVLHEMIQQIFNLFSTKDSSAAWDETLLDKFYTELYQQLNDLEACVIQGVGVTETPLMKEDSILAVRKYFQRITLYLKEKKYSPCAWEVVRAEIMRSFSLSTNLQESLRSKE

SEQ ID NO: 138 - protein, 165 aa, Artificial Sequence
  L26N/S28T Mutant IFN-alpha 2b
CDLPQTHSLGSRRTLMLLAQMRRISNFTCLKDRHDFGFPQEEFGNQFQKAETIPVLHEMIQQIFNLFSTKDSSAAWDETLLDKFYTELYQQLNDLEACVIQGVGVTETPLMKEDSILAVRKYFQRITLYLKEKKYSPCAWEVVRAEIMRSFSLSTNLQESLRSKE

SEQ ID NO: 139 - protein, 165 aa, Artificial Sequence
  L30N/D32S Mutant IFN-alpha 2b
CDLPQTHSLGSRRTLMLLAQMRRISLFSCNKSRHDFGFPQEEFGNQFQKAETIPVLHEMIQQIFNLFSTKDSSAAWDETLLDKFYTELYQQLNDLEACVIQGVGVTETPLMKEDSILAVRKYFQRITLYLKEKKYSPCAWEVVRAEIMRSFSLSTNLQESLRSKE

SEQ ID NO: 140 - protein, 165 aa, Artificial Sequence
  R33N/D35S Mutant IFN-alpha 2b
CDLPQTHSLGSRRTLMLLAQMRRISLFSCLKDNHSFGFPQEEFGNQFQKAETIPVLHEMIQQIFNLFSTKDSSAAWDETLLDKFYTELYQQLNDLEACVIQGVGVTETPLMKEDSILAVRKYFQRITLYLKEKKYSPCAWEVVRAEIMRSFSLSTNLQESLRSKE

SEQ ID NO: 141 - protein, 165 aa, Artificial Sequence
  R33N/D35T Mutant IFN-alpha 2b
CDLPQTHSLGSRRTLMLLAQMRRISLFSCLKDNHTFGFPQEEFGNQFQKAETIPVLHEMIQQIFNLFSTKDSSAAWDETLLDKFYTELYQQLNDLEACVIQGVGVTETPLMKEDSILAVRKYFQRITLYLKEKKYSPCAWEVVRAEIMRSFSLSTNLQESLRSKE

SEQ ID NO: 142 - protein, 165 aa, Artificial Sequence
  H34N/F36S Mutant IFN-alpha 2b
CDLPQTHSLGSRRTLMLLAQMRRISLFSCLKDRNDSGFPQEEFGNQFQKAETIPVLHEMIQQIFNLFSTKDSSAAWDETLLDKFYTELYQQLNDLEACVIQGVGVTETPLMKEDSILAVRKYFQRITLYLKEKKYSPCAWEVVRAEIMRSFSLSTNLQESLRSKE

SEQ ID NO: 143 - protein, 165 aa, Artificial Sequence
  H34N/F36T Mutant IFN-alpha 2b
CDLPQTHSLGSRRTLMLLAQMRRISLFSCLKDRNDTGFPQEEFGNQFQKAETIPVLHEMIQQIFNLFSTKDSSAAWDETLLDKFYTELYQQLNDLEACVIQGVGVTETPLMKEDSILAVRKYFQRITLYLKEKKYSPCAWEVVRAEIMRSFSLSTNLQESLRSKE

SEQ ID NO: 144 - protein, 165 aa, Artificial Sequence
  D35N/G37S Mutant IFN-alpha 2b
CDLPQTHSLGSRRTLMLLAQMRRISLFSCLKDRHNFSFPQEEFGNQFQKAETIPVLHEMIQQIFNLFSTKDSSAAWDETLLDKFYTELYQQLNDLEACVIQGVGVTETPLMKEDSILAVRKYFQRITLYLKEKKYSPCAWEVVRAEIMRSFSLSTNLQESLRSKE

SEQ ID NO: 145 - protein, 165 aa, Artificial Sequence
  F36N/F38S Mutant IFN-alpha 2b
CDLPQTHSLGSRRTLMLLAQMRRISLFSCLKDRHDNGSPQEEFGNQFQKAETIPVLHEMIQQIFNLFSTKDSSAAWDETLLDKFYTELYQQLNDLEACVIQGVGVTETPLMKEDSILAVRKYFQRITLYLKEKKYSPCAWEVVRAEIMRSFSLSTNLQESLRSKE

SEQ ID NO: 146 - protein, 165 aa, Artificial Sequence
  F36N/F38T Mutant IFN-alpha 2b
CDLPQTHSLGSRRTLMLLAQMRRISLFSCLKDRHDNGTPQEEFGNQFQKAETIPVLHEMIQQIFNLFSTKDSSAAWDETLLDKFYTELYQQLNDLEACVIQGVGVTETPLMKEDSILAVRKYFQRITLYLKEKKYSPCAWEVVRAEIMRSFSLSTNLQESLRSKE

SEQ ID NO: 147 - protein, 165 aa, Artificial Sequence
  G37N/P39T Mutant IFN-alpha 2b
CDLPQTHSLGSRRTLMLLAQMRRISLFSCLKDRHDFNFTQEEFGNQFQKAETIPVLHEMIQQIFNLFSTKDSSAAWDETLLDKFYTELYQQLNDLEACVIQGVGVTETPLMKEDSILAVRKYFQRITLYLKEKKYSPCAWEVVRAEIMRSFSLSTNLQESLRSKE

SEQ ID NO: 148 - protein, 165 aa, Artificial Sequence
  F38N/Q40S Mutant IFN-alpha 2b
CDLPQTHSLGSRRTLMLLAQMRRISLFSCLKDRHDFGNPSEEFGNQFQKAETIPVLHEMIQQIFNLFSTKDSSAAWDETLLDKFYTELYQQLNDLEACVIQGVGVTETPLMKEDSILAVRKYFQRITLYLKEKKYSPCAWEVVRAEIMRSFSLSTNLQESLRSKE

SEQ ID NO: 149 - protein, 165 aa, Artificial Sequence
  F38N/Q40T Mutant IFN-alpha 2b
CDLPQTHSLGSRRTLMLLAQMRRISLFSCLKDRHDFGNPTEEFGNQFQKAETIPVLHEMIQQIFNLFSTKDSSAAWDETLLDKFYTELYQQLNDLEACVIQGVGVTETPLMKEDSILAVRKYFQRITLYLKEKKYSPCAWEVVRAEIMRSFSLSTNLQESLRSKE

SEQ ID NO: 150 - protein, 165 aa, Artificial Sequence
  P39N/E41S Mutant IFN-alpha 2b
CDLPQTHSLGSRRTLMLLAQMRRISLFSCLKDRHDFGFNQSEFGNQFQKAETIPVLHEMIQQIFNLFSTKDSSAAWDETLLDKFYTELYQQLNDLEACVIQGVGVTETPLMKEDSILAVRKYFQRITLYLKEKKYSPCAWEVVRAEIMRSFSLSTNLQESLRSKE

SEQ ID NO: 151 - protein, 165 aa, Artificial Sequence
  P39N/E41T Mutant IFN-alpha 2b
CDLPQTHSLGSRRTLMLLAQMRRISLFSCLKDRHDFGFNQTEFGNQFQKAETIPVLHEMIQQIFNLFSTKDSSAAWDETLLDKFYTELYQQLNDLEACVIQGVGVTETPLMKEDSILAVRKYFQRITLYLKEKKYSPCAWEVVRAEIMRSFSLSTNLQESLRSKE

SEQ ID NO: 152 - protein, 165 aa, Artificial Sequence
  Q40N/E42S Mutant IFN-alpha 2b
CDLPQTHSLGSRRTLMLLAQMRRISLFSCLKDRHDFGFPNESFGNQFQKAETIPVLHEMIQQIFNLFSTKDSSAAWDETLLDKFYTELYQQLNDLEACVIQGVGVTETPLMKEDSILAVRKYFQRITLYLKEKKYSPCAWEVVRAEIMRSFSLSTNLQESLRSKE

SEQ ID NO: 153 - protein, 165 aa, Artificial Sequence
  Q40N/E42T Mutant IFN-alpha 2b
CDLPQTHSLGSRRTLMLLAQMRRISLFSCLKDRHDFGFPNETFGNQFQKAETIPVLHEMIQQIFNLFSTKDSSAAWDETLLDKFYTELYQQLNDLEACVIQGVGVTETPLMKEDSILAVRKYFQRITLYLKEKKYSPCAWEVVRAEIMRSFSLSTNLQESLRSKE

SEQ ID NO: 154 - protein, 165 aa, Artificial Sequence
  E41N/F43S Mutant IFN-alpha 2b
CDLPQTHSLGSRRTLMLLAQMRRISLFSCLKDRHDFGFPQNESGNQFQKAETIPVLHEMIQQIFNLFSTKDSSAAWDETLLDKFYTELYQQLNDLEACVIQGVGVTETPLMKEDSILAVRKYFQRITLYLKEKKYSPCAWEVVRAEIMRSFSLSTNLQESLRSKE

SEQ ID NO: 155 - protein, 165 aa, Artificial Sequence
  E41N/F43T Mutant IFN-alpha 2b
CDLPQTHSLGSRRTLMLLAQMRRISLFSCLKDRHDFGFPQNETGNQFQKAETIPVLHEMIQQIFNLFSTKDSSAAWDETLLDKFYTELYQQLNDLEACVIQGVGVTETPLMKEDSILAVRKYFQRITLYLKEKKYSPCAWEVVRAEIMRSFSLSTNLQESLRSKE

SEQ ID NO: 156 - protein, 165 aa, Artificial Sequence
  G44N/Q46S Mutant IFN-alpha 2b
CDLPQTHSLGSRRTLMLLAQMRRISLFSCLKDRHDFGFPQEEFNNSFQKAETIPVLHEMIQQIFNLFSTKDSSAAWDETLLDKFYTELYQQLNDLEACVIQGVGVTETPLMKEDSILAVRKYFQRITLYLKEKKYSPCAWEVVRAEIMRSFSLSTNLQESLRSKE

SEQ ID NO: 157 - protein, 165 aa, Artificial Sequence
  G44N/Q46T Mutant IFN-alpha 2b
CDLPQTHSLGSRRTLMLLAQMRRISLFSCLKDRHDFGFPQEEFNNTFQKAETIPVLHEMIQQIFNLFSTKDSSAAWDETLLDKFYTELYQQLNDLEACVIQGVGVTETPLMKEDSILAVRKYFQRITLYLKEKKYSPCAWEVVRAEIMRSFSLSTNLQESLRSKE

SEQ ID NO: 158 - protein, 165 aa, Artificial Sequence
  N45N/F47S Mutant IFN-alpha 2b
CDLPQTHSLGSRRTLMLLAQMRRISLFSCLKDRHDFGFPQEEFGNQSQKAETIPVLHEMIQQIFNLFSTKDSSAAWDETLLDKFYTELYQQLNDLEACVIQGVGVTETPLMKEDSILAVRKYFQRITLYLKEKKYSPCAWEVVRAEIMRSFSLSTNLQESLRSKE

SEQ ID NO: 159 - protein, 165 aa, Artificial Sequence
  N45N/F47T Mutant IFN-alpha 2b
CDLPQTHSLGSRRTLMLLAQMRRISLFSCLKDRHDFGFPQEEFGNQTQKAETIPVLHEMIQQIFNLFSTKDSSAAWDETLLDKFYTELYQQLNDLEACVIQGVGVTETPLMKEDSILAVRKYFQRITLYLKEKKYSPCAWEVVRAEIMRSFSLSTNLQESLRSKE

SEQ ID NO: 160 - protein, 165 aa, Artificial Sequence
  Q46N/Q48S Mutant IFN-alpha 2b
CDLPQTHSLGSRRTLMLLAQMRRISLFSCLKDRHDFGFPQEEFGNNFSKAETIPVLHEMIQQIFNLFSTKDSSAAWDETLLDKFYTELYQQLNDLEACVIQGVGVTETPLMKEDSILAVRKYFQRITLYLKEKKYSPCAWEVVRAEIMRSFSLSTNLQESLRSKE

SEQ ID NO: 161 - protein, 165 aa, Artificial Sequence
  Q46N/Q48T Mutant IFN-alpha 2b
CDLPQTHSLGSRRTLMLLAQMRRISLFSCLKDRHDFGFPQEEFGNNFTKAETIPVLHEMIQQIFNLFSTKDSSAAWDETLLDKFYTELYQQLNDLEACVIQGVGVTETPLMKEDSILAVRKYFQRITLYLKEKKYSPCAWEVVRAEIMRSFSLSTNLQESLRSKE

SEQ ID NO: 162 - protein, 165 aa, Artificial Sequence
  F47N/K49S Mutant IFN-alpha 2b
CDLPQTHSLGSRRTLMLLAQMRRISLFSCLKDRHDFGFPQEEFGNQNQSAETIPVLHEMIQQIFNLFSTKDSSAAWDETLLDKFYTELYQQLNDLEACVIQGVGVTETPLMKEDSILAVRKYFQRITLYLKEKKYSPCAWEVVRAEIMRSFSLSTNLQESLRSKE

SEQ ID NO: 163 - protein, 165 aa, Artificial Sequence
  F47N/K49T Mutant IFN-alpha 2b
CDLPQTHSLGSRRTLMLLAQMRRISLFSCLKDRHDFGFPQEEFGNQNQTAETIPVLHEMIQQIFNLFSTKDSSAAWDETLLDKFYTELYQQLNDLEACVIQGVGVTETPLMKEDSILAVRKYFQRITLYLKEKKYSPCAWEVVRAEIMRSFSLSTNLQESLRSKE

SEQ ID NO: 164 - protein, 165 aa, Artificial Sequence
  K49N/E51S Mutant IFN-alpha 2b
CDLPQTHSLGSRRTLMLLAQMRRISLFSCLKDRHDFGFPQEEFGNQFQNASTIPVLHEMIQQIFNLFSTKDSSAAWDETLLDKFYTELYQQLNDLEACVIQGVGVTETPLMKEDSILAVRKYFQRITLYLKEKKYSPCAWEVVRAEIMRSFSLSTNLQESLRSKE

SEQ ID NO: 165 - protein, 165 aa, Artificial Sequence
  A75N/D77S Mutant IFN-alpha 2b
CDLPQTHSLGSRRTLMLLAQMRRISLFSCLKDRHDFGFPQEEFGNQFQKAETIPVLHEMIQQIFNLFSTKDSSANWSETLLDKFYTELYQQLNDLEACVIQGVGVTETPLMKEDSILAVRKYFQRITLYLKEKKYSPCAWEVVRAEIMRSFSLSTNLQESLRSKE

SEQ ID NO: 166 - protein, 165 aa, Artificial Sequence
  I100N/G102S Mutant IFN-alpha 2b
CDLPQTHSLGSRRTLMLLAQMRRISLFSCLKDRHDFGFPQEEFGNQFQKAETIPVLHEMIQQIFNLFSTKDSSAAWDETLLDKFYTELYQQLNDLEACVNQSVGVTETPLMKEDSILAVRKYFQRITLYLKEKKYSPCAWEVVRAEIMRSFSLSTNLQESLRSKE

SEQ ID NO: 167 - protein, 165 aa, Artificial Sequence
  I100N/G102T Mutant IFN-alpha 2b
CDLPQTHSLGSRRTLMLLAQMRRISLFSCLKDRHDFGFPQEEFGNQFQKAETIPVLHEMIQQIFNLFSTKDSSAAWDETLLDKFYTELYQQLNDLEACVNQTVGVTETPLMKEDSILAVRKYFQRITLYLKEKKYSPCAWEVVRAEIMRSFSLSTNLQESLRSKE

SEQ ID NO: 168 - protein, 165 aa, Artificial Sequence
  V103N/V105S Mutant IFN-alpha 2b
CDLPQTHSLGSRRTLMLLAQMRRISLFSCLKDRHDFGFPQEEFGNQFQKAETIPVLHEMIQQIFNLFSTKDSSAAWDETLLDKFYTELYQQLNDLEACVIQGNGSTETPLMKEDSILAVRKYFQRITLYLKEKKYSPCAWEVVRAEIMRSFSLSTNLQESLRSKE

SEQ ID NO: 169 - protein, 165 aa, Artificial Sequence
  V103N/V105T Mutant IFN-alpha 2b
CDLPQTHSLGSRRTLMLLAQMRRISLFSCLKDRHDFGFPQEEFGNQFQKAETIPVLHEMIQQIFNLFSTKDSSAAWDETLLDKFYTELYQQLNDLEACVIQGNGTTETPLMKEDSILAVRKYFQRITLYLKEKKYSPCAWEVVRAEIMRSFSLSTNLQESLRSKE

SEQ ID NO: 170 - protein, 165 aa, Artificial Sequence
  G104N/T106T Mutant IFN-alpha 2b
CDLPQTHSLGSRRTLMLLAQMRRISLFSCLKDRHDFGFPQEEFGNQFQKAETIPVLHEMIQQIFNLFSTKDSSAAWDETLLDKFYTELYQQLNDLEACVIQGVNVTETPLMKEDSILAVRKYFQRITLYLKEKKYSPCAWEVVRAEIMRSFSLSTNLQESLRSKE

SEQ ID NO: 171 - protein, 165 aa, Artificial Sequence
  V105N/E107S Mutant IFN-alpha 2b
CDLPQTHSLGSRRTLMLLAQMRRISLFSCLKDRHDFGFPQEEFGNQFQKAETIPVLHEMIQQIFNLFSTKDSSAAWDETLLDKFYTELYQQLNDLEACVIQGVGNTSTPLMKEDSILAVRKYFQRITLYLKEKKYSPCAWEVVRAEIMRSFSLSTNLQESLRSKE

SEQ ID NO: 172 - protein, 165 aa, Artificial Sequence
  T106N/T108S Mutant IFN-alpha 2b
CDLPQTHSLGSRRTLMLLAQMRRISLFSCLKDRHDFGFPQEEFGNQFQKAETIPVLHEMIQQIFNLFSTKDSSAAWDETLLDKFYTELYQQLNDLEACVIQGVGVNESPLMKEDSILAVRKYFQRITLYLKEKKYSPCAWEVVRAEIMRSFSLSTNLQESLRSKE

SEQ ID NO: 173 - protein, 165 aa, Artificial Sequence
  T106N/T108T Mutant IFN-alpha 2b
CDLPQTHSLGSRRTLMLLAQMRRISLFSCLKDRHDFGFPQEEFGNQFQKAETIPVLHEMIQQIFNLFSTKDSSAAWDETLLDKFYTELYQQLNDLEACVIQGVGVNETPLMKEDSILAVRKYFQRITLYLKEKKYSPCAWEVVRAEIMRSFSLSTNLQESLRSKE

SEQ ID NO: 174 - protein, 165 aa, Artificial Sequence
  E107N/P109S Mutant IFN-alpha 2b
CDLPQTHSLGSRRTLMLLAQMRRISLFSCLKDRHDFGFPQEEFGNQFQKAETIPVLHEMIQQIFNLFSTKDSSAAWDETLLDKFYTELYQQLNDLEACVIQGVGVTNTSLMKEDSILAVRKYFQRITLYLKEKKYSPCAWEVVRAEIMRSFSLSTNLQESLRSKE

SEQ ID NO: 175 - protein, 165 aa, Artificial Sequence
  E107N/P109T Mutant IFN-alpha 2b
CDLPQTHSLGSRRTLMLLAQMRRISLFSCLKDRHDFGFPQEEFGNQFQKAETIPVLHEMIQQIFNLFSTKDSSAAWDETLLDKFYTELYQQLNDLEACVIQGVGVTNTTLMKEDSILAVRKYFQRITLYLKEKKYSPCAWEVVRAEIMRSFSLSTNLQESLRSKE

SEQ ID NO: 176 - protein, 165 aa, Artificial Sequence
  K134N/S136T Mutant IFN-alpha 2b
CDLPQTHSLGSRRTLMLLAQMRRISLFSCLKDRHDFGFPQEEFGNQFQKAETIPVLHEMIQQIFNLFSTKDSSAAWDETLLDKFYTELYQQLNDLEACVIQGVGVTETPLMKEDSILAVRKYFQRITLYLKEKNYTPCAWEVVRAEIMRSFSLSTNLQESLRSKE

SEQ ID NO: 177 - protein, 165 aa, Artificial Sequence
  L157N/E159S Mutant IFN-alpha 2b
CDLPQTHSLGSRRTLMLLAQMRRISLFSCLKDRHDFGFPQEEFGNQFQKAETIPVLHEMIQQIFNLFSTKDSSAAWDETLLDKFYTELYQQLNDLEACVIQGVGVTETPLMKEDSILAVRKYFQRITLYLKEKKYSPCAWEVVRAEIMRSFSLSTNNQSSLRSKE

SEQ ID NO: 178 - protein, 165 aa, Artificial Sequence
  L157N/E159T Mutant IFN-alpha 2b
CDLPQTHSLGSRRTLMLLAQMRRISLFSCLKDRHDFGFPQEEFGNQFQKAETIPVLHEMIQQIFNLFSTKDSSAAWDETLLDKFYTELYQQLNDLEACVIQGVGVTETPLMKEDSILAVRKYFQRITLYLKEKKYSPCAWEVVRAEIMRSFSLSTNNQTSLRSKE

SEQ ID NO: 179 - protein, 165 aa, Artificial Sequence
  Q158N/S160T Mutant IFN-alpha 2b
CDLPQTHSLGSRRTLMLLAQMRRISLFSCLKDRHDFGFPQEEFGNQFQKAETIPVLHEMIQQIFNLFSTKDSSAAWDETLLDKFYTELYQQLNDLEACVIQGVGVTETPLMKEDSILAVRKYFQRITLYLKEKKYSPCAWEVVRAEIMRSFSLSTNLNETLRSKE

SEQ ID NO: 180 - protein, 165 aa, Artificial Sequence
  E159N/L161S Mutant IFN-alpha 2b
CDLPQTHSLGSRRTLMLLAQMRRISLFSCLKDRHDFGFPQEEFGNQFQKAETIPVLHEMIQQIFNLFSTKDSSAAWDETLLDKFYTELYQQLNDLEACVIQGVGVTETPLMKEDSILAVRKYFQRITLYLKEKKYSPCAWEVVRAEIMRSFSLSTNLQNSSRSKE

SEQ ID NO: 181 - protein, 165 aa, Artificial Sequence
  E159N/L161T Mutant IFN-alpha 2b
CDLPQTHSLGSRRTLMLLAQMRRISLFSCLKDRHDFGFPQEEFGNQFQKAETIPVLHEMIQQIFNLFSTKDSSAAWDETLLDKFYTELYQQLNDLEACVIQGVGVTETPLMKEDSILAVRKYFQRITLYLKEKKYSPCAWEVVRAEIMRSFSLSTNLQNSTRSKE

SEQ ID NO: 182 - protein, 165 aa, Homo sapiens
CDLPQTHSLGSRRTLMLLAQMRKISLFSCLKDRHDFGFPQEEFGNQFQKAETIPVLHEMIQQIFNLFSTKDSSAAWDETLLDKFYTELYQQLNDLEACVIQGVGVTETPLMKEDSILAVRKYFQRITLYLKEKKYSPCAWEVVRAEIMRSFSLSTNLQESLRSKE

SEQ ID NO: 183 - protein, 166 aa, Homo sapiens
CDLPQTHSLGNRRALILLGQMGRISPFSCLKDRHDFRIPQEEFDGNQFQKAQAISVLHEMIQQTFNLFSTEDSSAAWEQSLLEKFSTELYQQLNDLEACVIQEVGVEETPLMNEDSILAVRKYFQRITLYLIERKYSPCAWEVVRAEIMRSLSFSTNLQKRLRRKD

SEQ ID NO: 184 - skipped

SEQ ID NO: 185 - protein, 165 aa, Homo sapiens
CDLPQTHSLGSRRTLMLLAQMRRISLFSCLKDRRDFGFPQEEFGNQFQKAETIPVLHEMIQQIFNLFSTKDSSAAWDETLLDKFYTELYQQLNDLEACVIQGVGVTETPLMKEDSILAVRKYFQRITLYLKEKKYSPCAWEVVRAEIMRSFSLSTNLQESLRSKE

SEQ ID NO: 186 - protein, 166 aa, Homo sapiens
CDLPETHSLDNRRTLMLLAQMSRISPSSCLMDRHDFGFPQEEFDGNQFQKAPAISVLHELIQQIFNLFTTKDSSAAWDEDLLDKFCTELYQQLNDLEACVMQEERVGETPLMNADSILAVKKYFRRITLYLTEKKYSPCAWEVVRAEIMRSLSLSTNLQERLRRKE

SEQ ID NO: 187 - protein, 166 aa, Homo sapiens
CDLPQTHSLSNRRTLMIMAQMGRISPFSCLKDRHDFGFPQEEFDGNQFQKAQAISVLHEMIQQTFNLFSTKDSSATWDETLLDKFYTELYQQLNDLEACMMQEVGVEDTPLMNVDSILTVRKYFQRITLYLTEKKYSPCAWEVVRAEIMRSFSLSANLQERLRRKE

SEQ ID NO: 188 - protein, 166 aa, Homo sapiens
CDLPQTHSLGHRRTMMLLAQMRRISLFSCLKDRHDFRFPQEEFDGNQFQKAEAISVLHEVIQQTFNLFSTKDSSVAWDERLLDKLYTELYQQLNDLEACVMQEVWVGGTPLMNEDSILAVRKYFQRITLYLTEKKYSPCAWEVVRAEIMRSFSSSRNLQERLRRKE

SEQ ID NO: 189 - protein, 166 aa, Homo sapiens
CDLPQTHSLGNRRALILLAQMGRISHFSCLKDRHDFGFPEEEFDGHQFQKAQAISVLHEMIQQTFNLFSTEDSSAAWEQSLLEKFSTELYQQLNDLEACVIQEVGVEETPLMNEDSILAVRKYFQRITLYLTEKKYSPCAWEVVRAEIMRSLSFSTNLQKRLRRKD

SEQ ID NO: 190 - protein, 166 aa, Homo sapiens
CDLPQTHSLGNRRALILLAQMGRISHFSCLKDRHDFGFPEEEFDGHQFQKTQAISVLHEMIQQTFNLFSTEDSSAAWEQSLLEKFSTELYQQLNDLEACVIQEVGVEETPLMNVDSILAVRKYFQRITLYLTEKKYSPCAWEVVRAEIMRSLSFSTNLQKRLRRKD

SEQ ID NO: 191 - protein, 166 aa, Homo sapiens
CDLPQTHSLGNRRALILLAQMGRISPFSCLKDRHDFGLPQEEFDGNQFQKTQAISVLHEMIQQTFNLFSTEDSSAAWEQSLLEKFSTELYQQLNNLEACVIQEVGMEETPLMNEDSILAVRKYFQRITLYLTEKKYSPCAWEVVRAEIMRSLSFSTNLQKILRRKD

SEQ ID NO: 192 - protein, 166 aa, Homo sapiens
CDLPQTHSLRNRRALILLAQMGRISPFSCLKDRHEFRFPEEEFDGHQFQKTQAISVLHEMIQQTFNLFSTEDSSAAWEQSLLEKFSTELYQQLNDLEACVIQEVGVEETPLMNEDFILAVRKYFQRITLYLMEKKYSPCAWEVVRAEIMRSFSFSTNLKKGLRRKD

SEQ ID NO: 193 - protein, 166 aa, Homo sapiens
CNLSQTHSLNNRRTLMLMAQMRRISPFSCLKDRHDFEFPQEEFDGNQFQKAQAISVLHEMMQQTFNLFSTKNSSAAWDETLLEKFYIELFQQMNDLEACVIQEVGVEETPLMNEDSILAVKKYFQRITLYLMEKKYSPCAWEVVRAEIMRSLSFSTNLQKRLRRKD

SEQ ID NO: 194 - protein, 166 aa, Homo sapiens
CDLPQTHSLGNRRALILLAQMGRISPFSCLKDRHDFGFPQEEFDGNQFQKAQAISVLHEMIQQTFNLFSTKDSSATWEQSLLEKFSTELNQQLNDLEACVIQEVGVEETPLMNVDSILAVKKYFQRITLYLTEKKYSPCAWEVVRAEIMRSFSLSKIFQERLRRKE

SEQ ID NO: 195 - protein, 166 aa, Homo sapiens
CDLPQTHSLGNRRALILLAQMRRISPFSCLKDRHDFEFPQEEFDDKQFQKAQAISVLHEMIQQTFNLFSTKDSSAALDETLLDEFYIELDQQLNDLESCVMQEVGVIESPLMYEDSILAVRKYFQRITLYLTEKKYSSCAWEVVRAEIMRSFSLSINLQKRLKSKE

SEQ ID NO: 196 - protein, 166 aa, Homo sapiens
MSYNLLGFLQRSSNFQCQKLLWQLNGRLEYCLKDRMNFDIPEEIKQLQQFQKEDAALTIYEMLQNIFAIFRQDSSSTGWNETIVENLLANVYHQINHLKTVLEEKLEKEDFTRGKLMSSLHLKRYYGRILHYLKAKEYSHCAWTIVRVEILRNFYFINRLTGYLRN

SEQ ID NO: 197 - protein, 166 aa, Homo sapiens; identical to SEQ ID NO: 196

SEQ ID NO: 198 - protein, 183 aa, Homo sapiens
VPPGEDSKDVAAPHRQPLTSSERIDKQIRYILDGISALRKETCNKSNMCESSKEALAENNLNLPKMAEKDGCFQSGFNEETCLVKIITGLLEFEVYLEYLQNRFESSEEQARAVQMSTKVLIQFLQKKAKNLDAITTPDPTTNASLLTKLQAQNQWLQDMTTHLILRSFKEFLQSSLRALRQM

SEQ ID NO: 199 - protein, 146 aa, Homo sapiens
CYCQDPYVKEAENLKKYFNAGHSDVADNGTLFLGILKNWKEESDRKIMQSQIVSFYFKLFKNFKDDQSIQKSVETIKEDMNVKFFNSNKKKRDDFEKLTNYSVTDLNVQRKAIHELIQVMAELSPAAKTGKRKRSQMLFQGRRASQ

SEQ ID NO: 200 - skipped

SEQ ID NO: 201 - protein, 166 aa, Homo sapiens
APPRLICDSRVLERYLLEAKEAENITTGCAEHCSLNENITVPDTKVNFYAWKRMEVGQQAVEVWQGLALLSEAVLRGQALLVNSSQPWEPLQLHVDKAVSGLRSLTTLLRALGAQKEAISPPDAASAAPLRTITADTFRKLFRVYSNFLRGKLKLYTGEACRTGDR

SEQ ID NO: 202 - protein, 127 aa, Homo sapiens [sequence omitted]

SEQ ID NO: 203-209 - skipped (7 entries)

SEQ ID NO: 210 - protein, 177 aa, Homo sapiens
TPLGPASSLPQSFLLKCLEQVRKIQGDGAALQEKLVSECATYKLCHPEELVLLGHSLGIPWAPLSSCPSQALQLAGCLSQLHSGLFLYQGLLQALEGISPELGPTLDTLQLDVADFATTIWQQMEELGMAPALQPTQGAMPAFASAFQRRAGGVLVASHLQSFLEVSYRVLRHLAQP

SEQ ID NO: 211-231 - skipped (21 entries)

SEQ ID NO: 232 - protein, 165 aa, Artificial Sequence
  Interferon alpha consensus sequence
CDLPQTHSLGNRRALILLAQMRRISPFSCLKDRHDFGPQEEFDGNQFQKAQAISVLHEMIQQTFNLFSTKDSSAAWDESLLEKFYTELYQQLNDLEACVIQEVGVEETPLMNVDSILAVKKYFQRITLYLTEKKYSPCAWEVVRAEIMRSFSLSTNLQERLRRKE

SEQ ID NO: 233 - protein, 166 aa, Homo sapiens
MSYNLLGFLQRSSNFQCQKLLWQLNGRLEYCLKDRMNFQIPEEIKQLQQFQKEDAALTIYEMLQNIFAIFRQDSSSTGWNETIVENLLANVYHQINHLKTVLEEKLEKEDFTRGKLMSSLHLKRYYGRILHYLKAKEYSHCAWTIVRVEILRNFYFINRLTGYLRN

SEQ ID NO: 234 - protein, 166 aa, Homo sapiens; identical to SEQ ID NO: 233

SEQ ID NO: 235 - protein, 166 aa, Homo sapiens
MSYNLLGFLQRSSNFQCQKLLWQLNGRLEYCLKDRMNFHIPEEIKQLQQFQKEDAALTIYEMLQNIFAIFRQDSSSTGWNETIVENLLANVYHQINHLKTVLEEKLEKEDFTRGKLMSSLHLKRYYGRILHYLKAKEYSHCAWTIVRVEILRNFYFINRLTGYLRN

SEQ ID NO: 236 - protein, 166 aa, Homo sapiens
MSYNLLGFLQRSSNFQCQKLLWQLNGRLEYCLKDRMNFGIPEEIKQLQQFQKEDAALTIYEMLQNIFAIFRQDSSSTGWNETIVENLLANVYHQINHLKTVLEEKLEKEDFTRGKLMSSLHLKRYYGRILHYLKAKEYSHCAWTIVRVEILRNFYFINRLTGYLRN

SEQ ID NO: 237 - protein, 166 aa, Homo sapiens
MSYNLLGFLQRSSNFQCQKLLWQLNGRLEYCLKDRMNFDIPQEIKQLQQFQKEDAALTIYEMLQNIFAIFRQDSSSTGWNETIVENLLANVYHQINHLKTVLEEKLEKEDFTRGKLMSSLHLKRYYGRILHYLKAKEYSHCAWTIVRVEILRNFYFINRLTGYLRN

SEQ ID NO: 238 - protein, 166 aa, Homo sapiens
MSYNLLGFLQRSSNFQCQKLLWQLNGRLEYCLKDRMNFDIPHEIKQLQQFQKEDAALTIYEMLQNIFAIFRQDSSSTGWNETIVENLLANVYHQINHLKTVLEEKLEKEDFTRGKLMSSLHLKRYYGRILHYLKAKEYSHCAWTIVRVEILRNFYFINRLTGYLRN

SEQ ID NO: 239 - protein, 166 aa, Homo sapiens
MSYNLLGFLQRSSNFQCQKLLWQLNGRLEYCLKDRMNFDIPEEIQQLQQFQKEDAALTIYEMLQNIFAIFRQDSSSTGWNETIVENLLANVYHQINHLKTVLEEKLEKEDFTRGKLMSSLHLKRYYGRILHYLKAKEYSHCAWTIVRVEILRNFYFINRLTGYLRN

SEQ ID NO: 240 - protein, 166 aa, Homo sapiens
MSYNLLGFLQRSSNFQCQKLLWQLNGRLEYCLKDRMNFDIPEEITQLQQFQKEDAALTIYEMLQNIFAIFRQDSSSTGWNETIVENLLANVYHQINHLKTVLEEKLEKEDFTRGKLMSSLHLKRYYGRILHYLKAKEYSHCAWTIVRVEILRNFYFINRLTGYLRN

SEQ ID NO: 241 - protein, 166 aa, Homo sapiens
MSYNLLGFLQRSSNFQCQKLLWQLNGRLEYCLKDRMNFDIPEEISQLQQFQKEDAALTIYEMLQNIFAIFRQDSSSTGWNETIVENLLANVYHQINHLKTVLEEKLEKEDFTRGKLMSSLHLKRYYGRILHYLKAKEYSHCAWTIVRVEILRNFYFINRLTGYLRN

SEQ ID NO: 242 - protein, 166 aa, Homo sapiens
MSYNLLGFLQRSSNFQCQKLLWQLNGRLEYCLKDRMNFDIPEEIHQLQQFQKEDAALTIYEMLQNIFAIFRQDSSSTGWNETIVENLLANVYHQINHLKTVLEEKLEKEDFTRGKLMSSLHLKRYYGRILHYLKAKEYSHCAWTIVRVEILRNFYFINRLTGYLRN

SEQ ID NO: 243 - protein, 166 aa, Homo sapiens
MSYNLLGFLQRSSNFQCQKLLWQLNGRLEYCLKDRMNFDIPEEIKQVQQFQKEDAALTIYEMLQNIFAIFRQDSSSTGWNETIVENLLANVYHQINHLKTVLEEKLEKEDFTRGKLMSSLHLKRYYGRILHYLKAKEYSHCAWTIVRVEILRNFYFINRLTGYLRN

SEQ ID NO: 244 - protein, 166 aa, Homo sapiens
MSYNLLGFLQRSSNFQCQKLLWQLNGRLEYCLKDRMNFDIPEEIKQIQQFQKEDAALTIYEMLQNIFAIFRQDSSSTGWNETIVENLLANVYHQINHLKTVLEEKLEKEDFTRGKLMSSLHLKRYYGRILHYLKAKEYSHCAWTIVRVEILRNFYFINRLTGYLRN

SEQ ID NO: 245 - protein, 166 aa, Homo sapiens
MSYNLLGFLQRSSNFQCQKLLWQLNGRLEYCLKDRMNFDIPEEIKQTQQFQKEDAALTIYEMLQNIFAIFRQDSSSTGWNETIVENLLANVYHQINHLKTVLEEKLEKEDFTRGKLMSSLHLKRYYGRILHYLKAKEYSHCAWTIVRVEILRNFYFINRLTGYLRN

SEQ ID NO: 246 - protein, 166 aa, Homo sapiens
MSYNLLGFLQRSSNFQCQKLLWQLNGRLEYCLKDRMNFDIPEEIKQQQQFQKEDAALTIYEMLQNIFAIFRQDSSSTGWNETIVENLLANVYHQINHLKTVLEEKLEKEDFTRGKLMSSLHLKRYYGRILHYLKAKEYSHCAWTIVRVEILRNFYFINRLTGYLRN

SEQ ID NO: 247 - protein, 166 aa, Homo sapiens
MSYNLLGFLQRSSNFQCQKLLWQLNGRLEYCLKDRMNFDIPEEIKQHQQFQKEDAALTIYEMLQNIFAIFRQDSSSTGWNETIVENLLANVYHQINHLKTVLEEKLEKEDFTRGKLMSSLHLKRYYGRILHYLKAKEYSHCAWTIVRVEILRNFYFINRLTGYLRN

SEQ ID NO: 248 - protein, 166 aa, Homo sapiens
MSYNLLGFLQRSSNFQCQKLLWQLNGRLEYCLKDRMNFDIPEEIKQAQQFQKEDAALTIYEMLQNIFAIFRQDSSSTGWNETIVENLLANVYHQINHLKTVLEEKLEKEDFTRGKLMSSLHLKRYYGRILHYLKAKEYSHCAWTIVRVEILRNFYFINRLTGYLRN

SEQ ID NO: 249 - protein, 166 aa, Homo sapiens
MSYNLLGFLQRSSNFQCQKLLWQLNGRLEYCLKDRMNFDIPEEIKQLQQFQQEDAALTIYEMLQNIFAIFRQDSSSTGWNETIVENLLANVYHQINHLKTVLEEKLEKEDFTRGKLMSSLHLKRYYGRILHYLKAKEYSHCAWTIVRVEILRNFYFINRLTGYLRN

SEQ ID NO: 250 - protein, 166 aa, Homo sapiens
MSYNLLGFLQRSSNFQCQKLLWQLNGRLEYCLKDRMNFDIPEEIKQLQQFQTEDAALTIYEMLQNIFAIFRQDSSSTGWNETIVENLLANVYHQINHLKTVLEEKLEKEDFTRGKLMSSLHLKRYYGRILHYLKAKEYSHCAWTIVRVEILRNFYFINRLTGYLRN

SEQ ID NO: 251 - protein, 166 aa, Homo sapiens
MSYNLLGFLQRSSNFQCQKLLWQLNGRLEYCLKDRMNFDIPEEIKQLQQFQSEDAALTIYEMLQNIFAIFRQDSSSTGWNETIVENLLANVYHQINHLKTVLEEKLEKEDFTRGKLMSSLHLKRYYGRILHYLKAKEYSHCAWTIVRVEILRNFYFINRLTGYLRN

SEQ ID NO: 252 - protein, 166 aa, Homo sapiens
MSYNLLGFLQRSSNFQCQKLLWQLNGRLEYCLKDRMNFDIPEEIKQLQQFQHEDAALTIYEMLQNIFAIFRQDSSSTGWNETIVENLLANVYHQINHLKTVLEEKLEKEDFTRGKLMSSLHLKRYYGRILHYLKAKEYSHCAWTIVRVEILRNFYFINRLTGYLRN

SEQ ID NO: 253 - protein, 166 aa, Homo sapiens
MSYNLLGFLQRSSNFQCQKLLWQLNGRLEYCLKDRMNFDIPEEIKQLQQFQKEDAALTIYEMLQNIIAIFRQDSSSTGWNETIVENLLANVYHQINHLKTVLEEKLEKEDFTRGKLMSSLHLKRYYGRILHYLKAKEYSHCAWTIVRVEILRNFYFINRLTGYLRN

SEQ ID NO: 254 - protein, 166 aa, Homo sapiens
MSYNLLGFLQRSSNFQCQKLLWQLNGRLEYCLKDRMNFDIPEEIKQLQQFQKEDAALTIYEMLQNIVAIFRQDSSSTGWNETIVENLLANVYHQINHLKTVLEEKLEKEDFTRGKLMSSLHLKRYYGRILHYLKAKEYSHCAWTIVRVEILRNFYFINRLTGYLRN

SEQ ID NO: 255 - protein, 166 aa, Homo sapiens
MSYNLLGFLQRSSNFQCQKLLWQLNGRLEYCLKDRMNFDIPEEIKQLQQFQKEDAALTIYEMLQNIFAIFHQDSSSTGWNETIVENLLANVYHQINHLKTVLEEKLEKEDFTRGKLMSSLHLKRYYGRILHYLKAKEYSHCAWTIVRVEILRNFYFINRLTGYLRN

SEQ ID NO: 256 - protein, 166 aa, Homo sapiens
MSYNLLGFLQRSSNFQCQKLLWQLNGRLEYCLKDRMNFDIPEEIKQLQQFQKEDAALTIYEMLQNIFAIFQQDSSSTGWNETIVENLLANVYHQINHLKTVLEEKLEKEDFTRGKLMSSLHLKRYYGRILHYLKAKEYSHCAWTIVRVEILRNFYFINRLTGYLRN

SEQ ID NO: 257 - protein, 166 aa, Homo sapiens
MSYNLLGFLQRSSNFQCQKLLWQLNGRLEYCLKDRMNFDIPEEIKQLQQFQKEDAALTIYEMLQNIFAIFRQQSSSTGWNETIVENLLANVYHQINHLKTVLEEKLEKEDFTRGKLMSSLHLKRYYGRILHYLKAKEYSHCAWTIVRVEILRNFYFINRLTGYLRN

SEQ ID NO: 258 - protein, 166 aa, Homo sapiens
MSYNLLGFLQRSSNFQCQKLLWQLNGRLEYCLKDRMNFDIPEEIKQLQQFQKEDAALTIYEMLQNIFAIFRQHSSSTGWNETIVENLLANVYHQINHLKTVLEEKLEKEDFTRGKLMSSLHLKRYYGRILHYLKAKEYSHCAWTIVRVEILRNFYFINRLTGYLRN

SEQ ID NO: 259 - protein, 166 aa, Homo sapiens
MSYNLLGFLQRSSNFQCQKLLWQLNGRLEYCLKDRMNFDIPEEIKQLQQFQKEDAALTIYEMLQNIFAIFRQGSSSTGWNETIVENLLANVYHQINHLKTVLEEKLEKEDFTRGKLMSSLHLKRYYGRILHYLKAKEYSHCAWTIVRVEILRNFYFINRLTGYLRN

SEQ ID NO: 260 - protein, 166 aa, Homo sapiens
MSYNLLGFLQRSSNFQCQKLLWQLNGRLEYCLKDRMNFDIPEEIKQLQQFQKEDAALTIYEMLQNIFAIFRQDSSSTGWNQTIVENLLANVYHQINHLKTVLEEKLEKEDFTRGKLMSSLHLKRYYGRILHYLKAKEYSHCAWTIVRVEILRNFYFINRLTGYLRN

SEQ ID NO: 261 - protein, 166 aa, Homo sapiens
MSYNLLGFLQRSSNFQCQKLLWQLNGRLEYCLKDRMNFDIPEEIKQLQQFQKEDAALTIYEMLQNIFAIFRQDSSSTGWNHTIVENLLANVYHQINHLKTVLEEKLEKEDFTRGKLMSSLHLKRYYGRILHYLKAKEYSHCAWTIVRVEILRNFYFINRLTGYLRN

SEQ ID NO: 262 - protein, 166 aa, Homo sapiens
MSYNLLGFLQRSSNFQCQKLLWQLNGRLEYCLKDRMNFDIPEEIKQLQQFQKEDAALTIYEMLQNIFAIFRQDSSSTGWNETIVENLLANVYHQINHLKTVLEEKLQKEDFTRGKLMSSLHLKRYYGRILHYLKAKEYSHCAWTIVRVEILRNFYFINRLTGYLRN

SEQ ID NO: 263 - protein, 166 aa, Homo sapiens
MSYNLLGFLQRSSNFQCQKLLWQLNGRLEYCLKDRMNFDIPEEIKQLQQFQKEDAALTIYEMLQNIFAIFRQDSSSTGWNETIVENLLANVYHQINHLKTVLEEKLHKEDFTRGKLMSSLHLKRYYGRILHYLKAKEYSHCAWTIVRVEILRNFYFINRLTGYLRN

SEQ ID NO: 264 - protein, 166 aa, Homo sapiens
MSYNLLGFLQRSSNFQCQKLLWQLNGRLEYCLKDRMNFDIPEEIKQLQQFQKEDAALTIYEMLQNIFAIFRQDSSSTGWNETIVENLLANVYHQINHLKTVLEEKLEQEDFTRGKLMSSLHLKRYYGRILHYLKAKEYSHCAWTIVRVEILRNFYFINRLTGYLRN

SEQ ID NO: 265 - protein, 166 aa, Homo sapiens
MSYNLLGFLQRSSNFQCQKLLWQLNGRLEYCLKDRMNFDIPEEIKQLQQFQKEDAALTIYEMLQNIFAIFRQDSSSTGWNETIVENLLANVYHQINHLKTVLEEKLETEDFTRGKLMSSLHLKRYYGRILHYLKAKEYSHCAWTIVRVEILRNFYFINRLTGYLRN

SEQ ID NO: 266 - protein, 166 aa, Homo sapiens
MSYNLLGFLQRSSNFQCQKLLWQLNGRLEYCLKDRMNFDIPEEIKQLQQFQKEDAALTIYEMLQNIFAIFRQDSSSTGWNETIVENLLANVYHQINHLKTVLEEKLESEDFTRGKLMSSLHLKRYYGRILHYLKAKEYSHCAWTIVRVEILRNFYFINRLTGYLRN

SEQ ID NO: 267 - protein, 166 aa, Homo sapiens
MSYNLLGFLQRSSNFQCQKLLWQLNGRLEYCLKDRMNFDIPEEIKQLQQFQKEDAALTIYEMLQNIFAIFRQDSSSTGWNETIVENLLANVYHQINHLKTVLEEKLEHEDFTRGKLMSSLHLKRYYGRILHYLKAKEYSHCAWTIVRVEILRNFYFINRLTGYLRN

SEQ ID NO: 268 - protein, 166 aa, Homo sapiens
MSYNLLGFLQRSSNFQCQKLLWQLNGRLEYCLKDRMNFDIPEEIKQLQQFQKEDAALTIYEMLQNIFAIFRQDSSSTGWNETIVENLLANVYHQINHLKTVLEEKLEKQDFTRGKLMSSLHLKRYYGRILHYLKAKEYSHCAWTIVRVEILRNFYFINRLTGYLRN

SEQ ID NO: 269 - protein, 166 aa, Homo sapiens
MSYNLLGFLQRSSNFQCQKLLWQLNGRLEYCLKDRMNFDIPEEIKQLQQFQKEDAALTIYEMLQNIFAIFRQDSSSTGWNETIVENLLANVYHQINHLKTVLEEKLEKHDFTRGKLMSSLHLKRYYGRILHYLKAKEYSHCAWTIVRVEILRNFYFINRLTGYLRN

SEQ ID NO: 270 - protein, 166 aa, Homo sapiens
MSYNLLGFLQRSSNFQCQKLLWQLNGRLEYCLKDRMNFDIPEEIKQLQQFQKEDAALTIYEMLQNIFAIFRQDSSSTGWNETIVENLLANVYHQINHLKTVLEEKLEKEQFTRGKLMSSLHLKRYYGRILHYLKAKEYSHCAWTIVRVEILRNFYFINRLTGYLRN

SEQ ID NO: 271 - protein, 166 aa, Homo sapiens
MSYNLLGFLQRSSNFQCQKLLWQLNGRLEYCLKDRMNFDIPEEIKQLQQFQKEDAALTIYEMLQNIFAIFRQDSSSTGWNETIVENLLANVYHQINHLKTVLEEKLEKEHFTRGKLMSSLHLKRYYGRILHYLKAKEYSHCAWTIVRVEILRNFYFINRLTGYLRN

SEQ ID NO: 272 - protein, 166 aa, Homo sapiens
MSYNLLGFLQRSSNFQCQKLLWQLNGRLEYCLKDRMNFDIPEEIKQLQQFQKEDAALTIYEMLQNIFAIFRQDSSSTGWNETIVENLLANVYHQINHLKTVLEEKLEKEGFTRGKLMSSLHLKRYYGRILHYLKAKEYSHCAWTIVRVEILRNFYFINRLTGYLRN

SEQ ID NO: 273 - protein, 166 aa, Homo sapiens
MSYNLLGFLQRSSNFQCQKLLWQLNGRLEYCLKDRMNFDIPEEIKQLQQFQKEDAALTIYEMLQNIFAIFRQDSSSTGWNETIVENLLANVYHQINHLKTVLEEKLEKEDITRGKLMSSLHLKRYYGRILHYLKAKEYSHCAWTIVRVEILRNFYFINRLTGYLRN

SEQ ID NO: 274 - protein, 166 aa, Homo sapiens
MSYNLLGFLQRSSNFQCQKLLWQLNGRLEYCLKDRMNFDIPEEIKQLQQFQKEDAALTIYEMLQNIFAIFRQDSSSTGWNETIVENLLANVYHQINHLKTVLEEKLEKEDVTRGKLMSSLHLKRYYGRILHYLKAKEYSHCAWTIVRVEILRNFYFINRLTGYLRN

SEQ ID NO: 275 - protein, 166 aa, Homo sapiens
MSYNLLGFLQRSSNFQCQKLLWQLNGRLEYCLKDRMNFDIPEEIKQLQQFQKEDAALTIYEMLQNIFAIFRQDSSSTGWNETIVENLLANVYHQINHLKTVLEEKLEKEDFTHGKLMSSLHLKRYYGRILHYLKAKEYSHCAWTIVRVEILRNFYFINRLTGYLRN

SEQ ID NO: 276 - protein, 166 aa, Homo sapiens
MSYNLLGFLQRSSNFQCQKLLWQLNGRLEYCLKDRMNFDIPEEIKQLQQFQKEDAALTIYEMLQNIFAIFRQDSSSTGWNETIVENLLANVYHQINHLKTVLEEKLEKEDFTQGKLMSSLHLKRYYGRILHYLKAKEYSHCAWTIVRVEILRNFYFINRLTGYLRN

SEQ ID NO: 277 - protein, 166 aa, Homo sapiens
MSYNLLGFLQRSSNFQCQKLLWQLNGRLEYCLKDRMNFDIPEEIKQLQQFQKEDAALTIYEMLQNIFAIFRQDSSSTGWNETIVENLLANVYHQINHLKTVLEEKLEKEDFTRGKVMSSLHLKRYYGRILHYLKAKEYSHCAWTIVRVEILRNFYFINRLTGYLRN

SEQ ID NO: 278 - protein, 166 aa, Homo sapiens
MSYNLLGFLQRSSNFQCQKLLWQLNGRLEYCLKDRMNFDIPEEIKQLQQFQKEDAALTIYEMLQNIFAIFRQDSSSTGWNETIVENLLANVYHQINHLKTVLEEKLEKEDFTRGKIMSSLHLKRYYGRILHYLKAKEYSHCAWTIVRVEILRNFYFINRLTGYLRN

SEQ ID NO: 279 - protein, 166 aa, Homo sapiens
MSYNLLGFLQRSSNFQCQKLLWQLNGRLEYCLKDRMNFDIPEEIKQLQQFQKEDAALTIYEMLQNIFAIFRQDSSSTGWNETIVENLLANVYHQINHLKTVLEEKLEKEDFTRGKTMSSLHLKRYYGRILHYLKAKEYSHCAWTIVRVEILRNFYFINRLTGYLRN

SEQ ID NO: 280 - protein, 166 aa, Homo sapiens
MSYNLLGFLQRSSNFQCQKLLWQLNGRLEYCLKDRMNFDIPEEIKQLQQFQKEDAALTIYEMLQNIFAIFRQDSSSTGWNETIVENLLANVYHQINHLKTVLEEKLEKEDFTRGKQMSSLHLKRYYGRILHYLKAKEYSHCAWTIVRVEILRNFYFINRLTGYLRN

SEQ ID NO: 281 - protein, 166 aa, Homo sapiens
MSYNLLGFLQRSSNFQCQKLLWQLNGRLEYCLKDRMNFDIPEEIKQLQQFQKEDAALTIYEMLQNIFAIFRQDSSSTGWNETIVENLLANVYHQINHLKTVLEEKLEKEDFTRGKHMSSLHLKRYYGRILHYLKAKEYSHCAWTIVRVEILRNFYFINRLTGYLRN

SEQ ID NO: 282 - protein, 166 aa, Homo sapiens
MSYNLLGFLQRSSNFQCQKLLWQLNGRLEYCLKDRMNFDIPEEIKQLQQFQKEDAALTIYEMLQNIFAIFRQDSSSTGWNETIVENLLANVYHQINHLKTVLEEKLEKEDFTRGKAMSSLHLKRYYGRILHYLKAKEYSHCAWTIVRVEILRNFYFINRLTGYLRN

SEQ ID NO: 283 - protein, 166 aa, Homo sapiens
MSYNLLGFLQRSSNFQCQKLLWQLNGRLEYCLKDRMNFDIPEEIKQLQQFQKEDAALTIYEMLQNIFAIFRQDSSSTGWNETIVENLLANVYHQINHLKTVLEEKLEKEDFTRGKLMSSVHLKRYYGRILHYLKAKEYSHCAWTIVRVEILRNFYFINRLTGYLRN

SEQ ID NO: 284 - protein, 166 aa, Homo sapiens
MSYNLLGFLQRSSNFQCQKLLWQLNGRLEYCLKDRMNFDIPEEIKQLQQFQKEDAALTIYEMLQNIFAIFRQDSSSTGWNETIVENLLANVYHQINHLKTVLEEKLEKEDFTRGKLMSSIHLKRYYGRILHYLKAKEYSHCAWTIVRVEILRNFYFINRLTGYLRN

SEQ ID NO: 285 - protein, 166 aa, Homo sapiens
MSYNLLGFLQRSSNFQCQKLLWQLNGRLEYCLKDRMNFDIPEEIKQLQQFQKEDAALTIYEMLQNIFAIFRQDSSSTGWNETIVENLLANVYHQINHLKTVLEEKLEKEDFTRGKLMSSTHLKRYYGRILHYLKAKEYSHCAWTIVRVEILRNFYFINRLTGYLRN

SEQ ID NO: 286 - protein, 166 aa, Homo sapiens
MSYNLLGFLQRSSNFQCQKLLWQLNGRLEYCLKDRMNFDIPEEIKQLQQFQKEDAALTIYEMLQNIFAIFRQDSSSTGWNETIVENLLANVYHQINHLKTVLEEKLEKEDFTRGKLMSSQHLKRYYGRILHYLKAKEYSHCAWTIVRVEILRNFYFINRLTGYLRN

SEQ ID NO: 287 - protein, 166 aa, Homo sapiens
MSYNLLGFLQRSSNFQCQKLLWQLNGRLEYCLKDRMNFDIPEEIKQLQQFQKEDAALTIYEMLQNIFAIFRQDSSSTGWNETIVENLLANVYHQINHLKTVLEEKLEKEDFTRGKLMSSHHLKRYYGRILHYLKAKEYSHCAWTIVRVEILRNFYFINRLTGYLRN

SEQ ID NO: 288 - protein, 166 aa, Homo sapiens
MSYNLLGFLQRSSNFQCQKLLWQLNGRLEYCLKDRMNFDIPEEIKQLQQFQKEDAALTIYEMLQNIFAIFRQDSSSTGWNETIVENLLANVYHQINHLKTVLEEKLEKEDFTRGKLMSSAHLKRYYGRILHYLKAKEYSHCAWTIVRVEILRNFYFINRLTGYLRN

SEQ ID NO: 289 - protein, 166 aa, Homo sapiens
MSYNLLGFLQRSSNFQCQKLLWQLNGRLEYCLKDRMNFDIPEEIKQLQQFQKEDAALTIYEMLQNIFAIFRQDSSSTGWNETIVENLLANVYHQINHLKTVLEEKLEKEDFTRGKLMSSLHLQRYYGRILHYLKAKEYSHCAWTIVRVEILRNFYFINRLTGYLRN

SEQ ID NO: 290 - protein, 100 aa, Homo sapiens
CYCQDPYVKEAENLKKYFNAGHSDVADNGTLFVGILKNWKEESDRKIMQSQIVSFYFKLFKNFKDDQSIQKSVETIKEDMNVKFFNSNKKKRDDFEKLTN

SEQ ID NO: 291 - protein, 100 aa, Homo sapiens
CYCQDPYVKEAENLKKYFNAGHSDVADNGTLFIGILKNWKEESDRKIMQSQIVSFYFKLFKNFKDDQSIQKSVETIKEDMNVKFFNSNKKKRDDFEKLTN

SEQ ID NO: 292 - protein, 100 aa, Homo sapiens
CYCQDPYVKEAENLKKYFNAGHSDVADNGTLFLGILQNWKEESDRKIMQSQIVSFYFKLFKNFKDDQSIQKSVETIKEDMNVKFFNSNKKKRDDFEKLTN

SEQ ID NO: 293 - protein, 100 aa, Homo sapiens
CYCQDPYVKEAENLKKYFNAGHSDVADNGTLFLGILNNWKEESDRKIMQSQIVSFYFKLFKNFKDDQSIQKSVETIKEDMNVKFFNSNKKKRDDFEKLTN

SEQ ID NO: 294 - protein, 100 aa, Homo sapiens
CYCQDPYVKEAENLKKYFNAGHSDVADNGTLFLGILKNWQEESDRKIMQSQIVSFYFKLFKNFKDDQSIQKSVETIKEDMNVKFFNSNKKKRDDFEKLTN

SEQ ID NO: 295 - protein, 100 aa, Homo sapiens
CYCQDPYVKEAENLKKYFNAGHSDVADNGTLFLGILKNWNEESDRKIMQSQIVSFYFKLFKNFKDDQSIQKSVETIKEDMNVKFFNSNKKKRDDFEKLTN

SEQ ID NO: 296 - protein, 100 aa, Homo sapiens
CYCQDPYVKEAENLKKYFNAGHSDVADNGTLFLGILKNWKQESDRKIMQSQIVSFYFKLFKNFKDDQSIQKSVETIKEDMNVKFFNSNKKKRDDFEKLTN

SEQ ID NO: 297 - protein, 100 aa, Homo sapiens
CYCQDPYVKEAENLKKYFNAGHSDVADNGTLFLGILKNWKNESDRKIMQSQIVSFYFKLFKNFKDDQSIQKSVETIKEDMNVKFFNSNKKKRDDFEKLTN

SEQ ID NO: 298 - protein, 100 aa, Homo sapiens
CYCQDPYVKEAENLKKYFNAGHSDVADNGTLFLGILKNWKHESDRKIMQSQIVSFYFKLFKNFKDDQSIQKSVETIKEDMNVKFFNSNKKKRDDFEKLTN

SEQ ID NO: 299 - protein, 100 aa, Homo sapiens
CYCQDPYVKEAENLKKYFNAGHSDVADNGTLFLGILKNWKEQSDRKIMQSQIVSFYFKLFKNFKDDQSIQKSVETIKEDMNVKFFNSNKKKRDDFEKLTN

SEQ ID NO: 300 - protein, 100 aa, Homo sapiens
CYCQDPYVKEAENLKKYFNAGHSDVADNGTLFLGILKNWKENSDRKIMQSQIVSFYFKLFKNFKDDQSIQKSVETIKEDMNVKFFNSNKKKRDDFEKLTN

SEQ ID NO: 301 - protein, 100 aa, Homo sapiens
CYCQDPYVKEAENLKKYFNAGHSDVADNGTLFLGILKNWKEHSDRKIMQSQIVSFYFKLFKNFKDDQSIQKSVETIKEDMNVKFFNSNKKKRDDFEKLTN

SEQ ID NO: 302 - protein, 100 aa, Homo sapiens
CYCQDPYVKEAENLKKYFNAGHSDVADNGTLFLGILKNWKEESDRKIMQSQIVSFYFQLFKNFKDDQSIQKSVETIKEDMNVKFFNSNKKKRDDFEKLTN

SEQ ID NO: 303 - protein, 100 aa, Homo sapiens
CYCQDPYVKEAENLKKYFNAGHSDVADNGTLFLGILKNWKEESDRKIMQSQIVSFYFNLFKNFKDDQSIQKSVETIKEDMNVKFFNSNKKKRDDFEKLTN

SEQ ID NO: 304 - protein, 100 aa, Homo sapiens
CYCQDPYVKEAENLKKYFNAGHSDVADNGTLFLGILKNWKEESDRKIMQSQIVSFYFKLFQNFKDDQSIQKSVETIKEDMNVKFFNSNKKKRDDFEKLTN

SEQ ID NO: 305 - protein, 100 aa, Homo sapiens
CYCQDPYVKEAENLKKYFNAGHSDVADNGTLFLGILKNWKEESDRKIMQSQIVSFYFKLFNNFKDDQSIQKSVETIKEDMNVKFFNSNKKKRDDFEKLTN

SEQ ID NO: 306 - protein, 100 aa, Homo sapiens
CYCQDPYVKEAENLKKYFNAGHSDVADNGTLFLGILKNWKEESDRKIMQSQIVSFYFKLFKNFQDDQSIQKSVETIKEDMNVKFFNSNKKKRDDFEKLTN

SEQ ID NO: 307 - protein, 100 aa, Homo sapiens
CYCQDPYVKEAENLKKYFNAGHSDVADNGTLFLGILKNWKEESDRKIMQSQIVSFYFKLFKNFNDDQSIQKSVETIKEDMNVKFFNSNKKKRDDFEKLTN

SEQ ID NO: 308 - protein, 100 aa, Homo sapiens
CYCQDPYVKEAENLKKYFNAGHSDVADNGTLFLGILKNWKEESDRKIMQSQIVSFYFKLFKNFKQDQSIQKSVETIKEDMNVKFFNSNKKKRDDFEKLTN

SEQ ID NO: 309 - protein, 100 aa, Homo sapiens
CYCQDPYVKEAENLKKYFNAGHSDVADNGTLFLGILKNWKEESDRKIMQSQIVSFYFKLFKNFKNDQSIQKSVETIKEDMNVKFFNSNKKKRDDFEKLTN

SEQ ID NO: 310 - protein, 100 aa, Homo sapiens
CYCQDPYVKEAENLKKYFNAGHSDVADNGTLFLGILKNWKEESDRKIMQSQIVSFYFKLFKNFKDQQSIQKSVETIKEDMNVKFFNSNKKKRDDFEKLTN

SEQ ID NO: 311 - protein, 100 aa, Homo sapiens
CYCQDPYVKEAENLKKYFNAGHSDVADNGTLFLGILKNWKEESDRKIMQSQIVSFYFKLFKNFKDNQSIQKSVETIKEDMNVKFFNSNKKKRDDFEKLTN

SEQ ID NO: 312-361 - skipped (50 entries)

SEQ ID NO: 362 - protein, 127 aa, Homo sapiens
APARSPSPSTQPWEHVNAIQEARRLLNLSRDTAAEMNQTVEVISEMFDLQEPTCLQTRLELYKQGLRGSLTKLKGPLTMMASHYKQHCPPTPETSCATQIITFESFKENLKDFLLVIPFDCWEPVQE

SEQ ID NO: 363 - protein, 127 aa, Homo sapiens
APARSPSPSTQPWEHVNAIQEARRLLNLSRDTAAEMNNTVEVISEMFDLQEPTCLQTRLELYKQGLRGSLTKLKGPLTMMASHYKQHCPPTPETSCATQIITFESFKENLKDFLLVIPFDCWEPVQE

SEQ ID NO: 364 - protein, 127 aa, Homo sapiens
APARSPSPSTQPWEHVNAIQEARRLLNLSRDTAAEMNHTVEVISEMFDLQEPTCLQTRLELYKQGLRGSLTKLKGPLTMMASHYKQHCPPTPETSCATQIITFESFKENLKDFLLVIPFDCWEPVQE

SEQ ID NO: 365 - protein, 127 aa, Homo sapiens
APARSPSPSTQPWEHVNAIQEARRLLNLSRDTAAEMNETVQVISEMFDLQEPTCLQTRLELYKQGLRGSLTKLKGPLTMMASHYKQHCPPTPETSCATQIITFESFKENLKDFLLVIPFDCWEPVQE

SEQ ID NO: 366 - protein, 127 aa, Homo sapiens
APARSPSPSTQPWEHVNAIQEARRLLNLSRDTAAEMNETVNVISEMFDLQEPTCLQTRLELYKQGLRGSLTKLKGPLTMMASHYKQHCPPTPETSCATQIITFESFKENLKDFLLVIPFDCWEPVQE

SEQ ID NO: 367 - protein, 127 aa, Homo sapiens
APARSPSPSTQPWEHVNAIQEARRLLNLSRDTAAEMNETVHVISEMFDLQEPTCLQTRLELYKQGLRGSLTKLKGPLTMMASHYKQHCPPTPETSCATQIITFESFKENLKDFLLVIPFDCWEPVQE

SEQ ID NO: 368 - protein, 127 aa, Homo sapiens
APARSPSPSTQPWEHVNAIQEARRLLNLSRDTAAEMNETVEVISQMFDLQEPTCLQTRLELYKQGLRGSLTKLKGPLTMMASHYKQHCPPTPETSCATQIITFESFKENLKDFLLVIPFDCWEPVQE

SEQ ID NO: 369 - protein, 127 aa, Homo sapiens
APARSPSPSTQPWEHVNAIQEARRLLNLSRDTAAEMNETVEVISNMFDLQEPTCLQTRLELYKQGLRGSLTKLKGPLTMMASHYKQHCPPTPETSCATQIITFESFKENLKDFLLVIPFDCWEPVQE

SEQ ID NO: 370 - protein, 127 aa, Homo sapiens
APARSPSPSTQPWEHVNAIQEARRLLNLSRDTAAEMNETVEVISHMFDLQEPTCLQTRLELYKQGLRGSLTKLKGPLTMMASHYKQHCPPTPETSCATQIITFESFKENLKDFLLVIPFDCWEPVQE

SEQ ID NO: 371 - protein, 127 aa, Homo sapiens
APARSPSPSTQPWEHVNAIQEARRLLNLSRDTAAEMNETVEVISEVFDLQEPTCLQTRLELYKQGLRGSLTKLKGPLTMMASHYKQHCPPTPETSCATQIITFESFKENLKDFLLVIPFDCWEPVQE

SEQ ID NO: 372 - protein, 127 aa, Homo sapiens
APARSPSPSTQPWEHVNAIQEARRLLNLSRDTAAEMNETVEVISEIFDLQEPTCLQTRLELYKQGLRGSLTKLKGPLTMMASHYKQHCPPTPETSCATQIITFESFKENLKDFLLVIPFDCWEPVQE

SEQ ID NO: 373 - protein, 127 aa, Homo sapiens
APARSPSPSTQPWEHVNAIQEARRLLNLSRDTAAEMNETVEVISEMFQLQEPTCLQTRLELYKQGLRGSLTKLKGPLTMMASHYKQHCPPTPETSCATQIITFESFKENLKDFLLVIPFDCWEPVQE

SEQ ID NO: 374 - protein, 127 aa, Homo sapiens
APARSPSPSTQPWEHVNAIQEARRLLNLSRDTAAEMNETVEVISEMFNLQEPTCLQTRLELYKQGLRGSLTKLKGPLTMMASHYKQHCPPTPETSCATQIITFESFKENLKDFLLVIPFDCWEPVQE

SEQ ID NO: 375 - protein, 127 aa, Homo sapiens
APARSPSPSTQPWEHVNAIQEARRLLNLSRDTAAEMNETVEVISEMFDVQEPTCLQTRLELYKQGLRGSLTKLKGPLTMMASHYKQHCPPTPETSCATQIITFESFKENLKDFLLVIPFDCWEPVQE

SEQ ID NO: 376 - protein, 127 aa, Homo sapiens
APARSPSPSTQPWEHVNAIQEARRLLNLSRDTAAEMNETVEVISEMFDIQEPTCLQTRLELYKQGLRGSLTKLKGPLTMMASHYKQHCPPTPETSCATQIITFESFKENLKDFLLVIPFDCWEPVQE

SEQ ID NO: 377 - protein, 127 aa, Homo sapiens
APARSPSPSTQPWEHVNAIQEARRLLNLSRDTAAEMNETVEVISEMFDLQQPTCLQTRLELYKQGLRGSLTKLKGPLTMMASHYKQHCPPTPETSCATQIITFESFKENLKDFLLVIPFDCWEPVQE

SEQ ID NO: 378 - protein, 127 aa, Homo sapiens
APARSPSPSTQPWEHVNAIQEARRLLNLSRDTAAEMNETVEVISEMFDLQNPTCLQTRLELYKQGLRGSLTKLKGPLTMMASHYKQHCPPTPETSCATQIITFESFKENLKDFLLVIPFDCWEPVQE

SEQ ID NO: 379 - protein, 127 aa, Homo sapiens
APARSPSPSTQPWEHVNAIQEARRLLNLSRDTAAEMNETVEVISEMFDLQHPTCLQTRLELYKQGLRGSLTKLKGPLTMMASHYKQHCPPTPETSCATQIITFESFKENLKDFLLVIPFDCWEPVQE

SEQ ID NO: 380 - protein, 127 aa, Homo sapiens
APARSPSPSTQPWEHVNAIQEARRLLNLSRDTAAEMNETVEVISEMFDLQEPTCLQTRLQLYKQGLRGSLTKLKGPLTMMASHYKQHCPPTPETSCATQIITFESFKENLKDFLLVIPFDCWEPVQE

SEQ ID NO: 381 - protein, 127 aa, Homo sapiens
APARSPSPSTQPWEHVNAIQEARRLLNLSRDTAAEMNETVEVISEMFDLQEPTCLQTRLNLYKQGLRGSLTKLKGPLTMMASHYKQHCPPTPETSCATQIITFESFKENLKDFLLVIPFDCWEPVQE

SEQ ID NO: 382 - protein, 127 aa, Homo sapiens
APARSPSPSTQPWEHVNAIQEARRLLNLSRDTAAEMNETVEVISEMFDLQEPTCLQTRLHLYKQGLRGSLTKLKGPLTMMASHYKQHCPPTPETSCATQIITFESFKENLKDFLLVIPFDCWEPVQE

SEQ ID NO: 383 - protein, 127 aa, Homo sapiens
APARSPSPSTQPWEHVNAIQEARRLLNLSRDTAAEMNETVEVISEMFDLQEPTCLQTRLELYQQGLRGSLTKLKGPLTMMASHYKQHCPPTPETSCATQIITFESFKENLKDFLLVIPFDCWEPVQE

SEQ ID NO: 384 - protein, 127 aa, Homo sapiens
APARSPSPSTQPWEHVNAIQEARRLLNLSRDTAAEMNETVEVISEMFDLQEPTCLQTRLELYNQGLRGSLTKLKGPLTMMASHYKQHCPPTPETSCATQIITFESFKENLKDFLLVIPFDCWEPVQE

SEQ ID NO: 385 - protein, 127 aa, Homo sapiens
APARSPSPSTQPWEHVNAIQEARRLLNLSRDTAAEMNETVEVISEMFDLQEPTCLQTRLELYKQGLHGSLTKLKGPLTMMASHYKQHCPPTPETSCATQIITFESFKENLKDFLLVIPFDCWEPVQE

SEQ ID NO: 386 - protein, 127 aa, Homo sapiens
APARSPSPSTQPWEHVNAIQEARRLLNLSRDTAAEMNETVEVISEMFDLQEPTCLQTRLELYKQGLQGSLTKLKGPLTMMASHYKQHCPPTPETSCATQIITFESFKENLKDFLLVIPFDCWEPVQE

SEQ ID NO: 387 - protein, 127 aa, Homo sapiens
APARSPSPSTQPWEHVNAIQEARRLLNLSRDTAAEMNETVEVISEMFDLQEPTCLQTRLELYKQGLRGSLTKLKGPLTMMASHYKQHCPPTSETSCATQIITFESFKENLKDFLLVIPFDCWEPVQE

SEQ ID NO: 388 - protein, 127 aa, Homo sapiens
APARSPSPSTQPWEHVNAIQEARRLLNLSRDTAAEMNETVEVISEMFDLQEPTCLQTRLELYKQGLRGSLTKLKGPLTMMASHYKQHCPPTAETSCATQIITFESFKENLKDFLLVIPFDCWEPVQE

SEQ ID NO: 389 - protein, 127 aa, Homo sapiens
APARSPSPSTQPWEHVNAIQEARRLLNLSRDTAAEMNETVEVISEMFDLQEPTCLQTRLELYKQGLRGSLTKLKGPLTMMASHYKQHCPPTPQTSCATQIITFESFKENLKDFLLVIPFDCWEPVQE

SEQ ID NO: 390 - protein, 127 aa, Homo sapiens
APARSPSPSTQPWEHVNAIQEARRLLNLSRDTAAEMNETVEVISEMFDLQEPTCLQTRLELYKQGLRGSLTKLKGPLTMMASHYKQHCPPTPNTSCATQIITFESFKENLKDFLLVIPFDCWEPVQE

SEQ ID NO: 391 - protein, 127 aa, Homo sapiens
APARSPSPSTQPWEHVNAIQEARRLLNLSRDTAAEMNETVEVISEMFDLQEPTCLQTRLELYKQGLRGSLTKLKGPLTMMASHYKQHCPPTPHTSCATQIITFESFKENLKDFLLVIPFDCWEPVQE

SEQ ID NO: 392 - protein, 127 aa, Homo sapiens
APARSPSPSTQPWEHVNAIQEARRLLNLSRDTAAEMNETVEVISEMFDLQEPTCLQTRLELYKQGLRGSLTKLKGPLTMMASHYKQHCPPTPETSCATQIITFESFKENLKDFLLVIPIDCWEPVQE

SEQ ID NO: 393 - protein, 127 aa, Homo sapiens
APARSPSPSTQPWEHVNAIQEARRLLNLSRDTAAEMNETVEVISEMFDLQEPTCLQTRLELYKQGLRGSLTKLKGPLTMMASHYKQHCPPTPETSCATQIITFESFKENLKDFLLVIPVDCWEPVQE

SEQ ID NO: 394 - protein, 127 aa, Homo sapiens
APARSPSPSTQPWEHVNAIQEARRLLNLSRDTAAEMNETVEVISEMFDLQEPTCLQTRLELYKQGLRGSLTKLKGPLTMMASHYKQHCPPTPETSCATQIITFESFKENLKDFLLVIPFQCWEPVQE

SEQ ID NO: 395 - protein, 127 aa, Homo sapiens
APARSPSPSTQPWEHVNAIQEARRLLNLSRDTAAEMNETVEVISEMFDLQEPTCLQTRLELYKQGLRGSLTKLKGPLTMMASHYKQHCPPTPETSCATQIITFESFKENLKDFLLVIPFNCWEPVQE

SEQ ID NO: 396 - protein, 127 aa, Homo sapiens
APARSPSPSTQPWEHVNAIQEARRLLNLSRDTAAEMNETVEVISEMFDLQEPTCLQTRLELYKQGLRGSLTKLKGPLTMMASHYKQHCPPTPETSCATQIITFESFKENLKDFLLVIPFDCWQPVQE

SEQ ID NO: 397 - protein, 127 aa, Homo sapiens
APARSPSPSTQPWEHVNAIQEARRLLNLSRDTAAEMNETVEVISEMFDLQEPTCLQTRLELYKQGLRGSLTKLKGPLTMMASHYKQHCPPTPETSCATQIITFESFKENLKDFLLVIPFDCWNPVQE

SEQ ID NO: 398 - protein, 127 aa, Homo sapiens
APARSPSPSTQPWEHVNAIQEARRLLNLSRDTAAEMNETVEVISEMFDLQEPTCLQTRLELYKQGLRGSLTKLKGPLTMMASHYKQHCPPTPETSCATQIITFESFKENLKDFLLVIPFDCWHPVQE

SEQ ID NO: 399 - protein, 127 aa, Homo sapiens
APARSPSPSTQPWEHVNAIQEARRLLNLSRDTAAEMNETVEVISEMFDLQEPTCLQTRLELYKQGLRGSLTKLKGPLTMMASHYKQHCPPTPETSCATQIITFESFKENLKDFLLVIPFDCWESVQE

SEQ ID NO: 400 - protein, 127 aa, Homo sapiens
APARSPSPSTQPWEHVNAIQEARRLLNLSRDTAAEMNETVEVISEMFDLQEPTCLQTRLELYKQGLRGSLTKLKGPLTMMASHYKQHCPPTPETSCATQIITFESFKENLKDFLLVIPFDCWEAVQE

SEQ ID NO: 401-630 - skipped (230 entries)

SEQ ID NO: 631 - protein, 177 aa, homo sapiens
TPLGPASSLPQSFLLKCLEQVRKIQGDGAALQEKLVSECATYKLCHPEELVLLGHSLGIPSAPLSSCPSQALQLAGCLSQLHSGLFLYQGLLQALEGISPELGPTLDTLQLDVADFATTIWQQMEELGMAPALQPTQGAMPAFASAFQRRAGGVLVASHLQSFLEVSYRVLRHLAQP

SEQ ID NO: 632 - protein, 177 aa, homo sapiens
TPLGPASSLPQSFLLKCLEQVRKIQGDGAALQEKLVSECATYKLCHPEELVLLGHSLGIPHAPLSSCPSQALQLAGCLSQLHSGLFLYQGLLQALEGISPELGPTLDTLQLDVADFATTIWQQMEELGMAPALQPTQGAMPAFASAFQRRAGGVLVASHLQSFLEVSYRVLRHLAQP

SEQ ID NO: 633 - protein, 177 aa, homo sapiens
TPLGPASSLPQSFLLKCLEQVRKIQGDGAALQEKLVSECATYKLCHPEELVLLGHSLGIPWASLSSCPSQALQLAGCLSQLHSGLFLYQGLLQALEGISPELGPTLDTLQLDVADFATTIWQQMEELGMAPALQPTQGAMPAFASAFQRRAGGVLVASHLQSFLEVSYRVLRHLAQP

SEQ ID NO: 634 - protein, 177 aa, homo sapiens
TPLGPASSLPQSFLLKCLEQVRKIQGDGAALQEKLVSECATYKLCHPEELVLLGHSLGIPWAALSSCPSQALQLAGCLSQLHSGLFLYQGLLQALEGISPELGPTLDTLQLDVADFATTIWQQMEELGMAPALQPTQGAMPAFASAFQRRAGGVLVASHLQSFLEVSYRVLRHLAQP

SEQ ID NO: 635 - protein, 177 aa, homo sapiens
TPLGPASSLPQSFLLKCLEQVRKIQGDGAALQEKLVSECATYKLCHPEELVLLGHSLGIPWAPLSSCSSQALQLAGCLSQLHSGLFLYQGLLQALEGISPELGPTLDTLQLDVADFATTIWQQMEELGMAPALQPTQGAMPAFASAFQRRAGGVLVASHLQSFLEVSYRVLRHLAQP

SEQ ID NO: 636 - protein, 177 aa, homo sapiens
TPLGPASSLPQSFLLKCLEQVRKIQGDGAALQEKLVSECATYKLCHPEELVLLGHSLGIPWAPLSSCASQALQLAGCLSQLHSGLFLYQGLLQALEGISPELGPTLDTLQLDVADFATTIWQQMEELGMAPALQPTQGAMPAFASAFQRRAGGVLVASHLQSFLEVSYRVLRHLAQP

SEQ ID NO: 637 - protein, 177 aa, homo sapiens
TPLGPASSLPQSFLLKCLEQVRKIQGDGAALQEKLVSECATYKLCHPEELVLLGHSLGIPWAPLSSCPSQAVQLAGCLSQLHSGLFLYQGLLQALEGISPELGPTLDTLQLDVADFATTIWQQMEELGMAPALQPTQGAMPAFASAFQRRAGGVLVASHLQSFLEVSYRVLRHLAQP

SEQ ID NO: 638 - protein, 177 aa, homo sapiens
TPLGPASSLPQSFLLKCLEQVRKIQGDGAALQEKLVSECATYKLCHPEELVLLGHSLGIPWAPLSSCPSQAIQLAGCLSQLHSGLFLYQGLLQALEGISPELGPTLDTLQLDVADFATTIWQQMEELGMAPALQPTQGAMPAFASAFQRRAGGVLVASHLQSFLEVSYRVLRHLAQP

SEQ ID NO: 639 - protein, 177 aa, homo sapiens
TPLGPASSLPQSFLLKCLEQVRKIQGDGAALQEKLVSECATYKLCHPEELVLLGHSLGIPWAPLSSCPSQALQLAGCLSQLHSGLILYQGLLQALEGISPELGPTLDTLQLDVADFATTIWQQMEELGMAPALQPTQGAMPAFASAFQRRAGGVLVASHLQSFLEVSYRVLRHLAQP

SEQ ID NO: 640 - protein, 177 aa, homo sapiens
TPLGPASSLPQSFLLKCLEQVRKIQGDGAALQEKLVSECATYKLCHPEELVLLGHSLGIPWAPLSSCPSQALQLAGCLSQLHSGLVLYQGLLQALEGISPELGPTLDTLQLDVADFATTIWQQMEELGMAPALQPTQGAMPAFASAFQRRAGGVLVASHLQSFLEVSYRVLRHLAQP

SEQ ID NO: 641 - protein, 177 aa, homo sapiens
TPLGPASSLPQSFLLKCLEQVRKIQGDGAALQEKLVSECATYKLCHPEELVLLGHSLGIPWAPLSSCPSQALQLAGCLSQLHSGLFLYQGLLQALQGISPELGPTLDTLQLDVADFATTIWQQMEELGMAPALQPTQGAMPAFASAFQRRAGGVLVASHLQSFLEVSYRVLRHLAQP

SEQ ID NO: 642 - protein, 177 aa, homo sapiens
TPLGPASSLPQSFLLKCLEQVRKIQGDGAALQEKLVSECATYKLCHPEELVLLGHSLGIPWAPLSSCPSQALQLAGCLSQLHSGLFLYQGLLQALNGISPELGPTLDTLQLDVADFATTIWQQMEELGMAPALQPTQGAMPAFASAFQRRAGGVLVASHLQSFLEVSYRVLRHLAQP

SEQ ID NO: 643 - protein, 177 aa, homo sapiens
TPLGPASSLPQSFLLKCLEQVRKIQGDGAALQEKLVSECATYKLCHPEELVLLGHSLGIPWAPLSSCPSQALQLAGCLSQLHSGLFLYQGLLQALHGISPELGPTLDTLQLDVADFATTIWQQMEELGMAPALQPTQGAMPAFASAFQRRAGGVLVASHLQSFLEVSYRVLRHLAQP

SEQ ID NO: 644 - protein, 177 aa, homo sapiens
TPLGPASSLPQSFLLKCLEQVRKIQGDGAALQEKLVSECATYKLCHPEELVLLGHSLGIPWAPLSSCPSQALQLAGCLSQLHSGLFLYQGLLQALEGISSELGPTLDTLQLDVADFATTIWQQMEELGMAPALQPTQGAMPAFASAFQRRAGGVLVASHLQSFLEVSYRVLRHLAQP

SEQ ID NO: 645 - protein, 177 aa, homo sapiens
TPLGPASSLPQSFLLKCLEQVRKIQGDGAALQEKLVSECATYKLCHPEELVLLGHSLGIPWAPLSSCPSQALQLAGCLSQLHSGLFLYQGLLQALEGISAELGPTLDTLQLDVADFATTIWQQMEELGMAPALQPTQGAMPAFASAFQRRAGGVLVASHLQSFLEVSYRVLRHLAQP

SEQ ID NO: 646 - protein, 177 aa, homo sapiens
TPLGPASSLPQSFLLKCLEQVRKIQGDGAALQEKLVSECATYKLCHPEELVLLGHSLGIPWAPLSSCPSQALQLAGCLSQLHSGLFLYQGLLQALEGISPQLGPTLDTLQLDVADFATTIWQQMEELGMAPALQPTQGAMPAFASAFQRRAGGVLVASHLQSFLEVSYRVLRHLAQP

SEQ ID NO: 647 - protein, 177 aa, homo sapiens
TPLGPASSLPQSFLLKCLEQVRKIQGDGAALQEKLVSECATYKLCHPEELVLLGHSLGIPWAPLSSCPSQALQLAGCLSQLHSGLFLYQGLLQALEGISPNLGPTLDTLQLDVADFATTIWQQMEELGMAPALQPTQGAMPAFASAFQRRAGGVLVASHLQSFLEVSYRVLRHLAQP

SEQ ID NO: 648 - protein, 177 aa, homo sapiens
TPLGPASSLPQSFLLKCLEQVRKIQGDGAALQEKLVSECATYKLCHPEELVLLGHSLGIPWAPLSSCPSQALQLAGCLSQLHSGLFLYQGLLQALEGISPHLGPTLDTLQLDVADFATTIWQQMEELGMAPALQPTQGAMPAFASAFQRRAGGVLVASHLQSFLEVSYRVLRHLAQP

SEQ ID NO: 649 - protein, 177 aa, homo sapiens
TPLGPASSLPQSFLLKCLEQVRKIQGDGAALQEKLVSECATYKLCHPEELVLLGHSLGIPWAPLSSCPSQALQLAGCLSQLHSGLFLYQGLLQALEGISPELGPTLDTLQLDVADFATTIWQQMEELGMASALQPTQGAMPAFASAFQRRAGGVLVASHLQSFLEVSYRVLRHLAQP

SEQ ID NO: 650 - protein, 177 aa, homo sapiens
TPLGPASSLPQSFLLKCLEQVRKIQGDGAALQEKLVSECATYKLCHPEELVLLGHSLGIPWAPLSSCPSQALQLAGCLSQLHSGLFLYQGLLQALEGISPELGPTLDTLQLDVADFATTIWQQMEELGMAAALQPTQGAMPAFASAFQRRAGGVLVASHLQSFLEVSYRVLRHLAQP

SEQ ID NO: 651 - protein, 177 aa, homo sapiens
TPLGPASSLPQSFLLKCLEQVRKIQGDGAALQEKLVSECATYKLCHPEELVLLGHSLGIPWAPLSSCPSQALQLAGCLSQLHSGLFLYQGLLQALEGISPELGPTLDTLQLDVADFATTIWQQMEELGMAPAVQPTQGAMPAFASAFQRRAGGVLVASHLQSFLEVSYRVLRHLAQP

SEQ ID NO: 652 - protein, 177 aa, homo sapiens
TPLGPASSLPQSFLLKCLEQVRKIQGDGAALQEKLVSECATYKLCHPEELVLLGHSLGIPWAPLSSCPSQALQLAGCLSQLHSGLFLYQGLLQALEGISPELGPTLDTLQLDVADFATTIWQQMEELGMAPAIQPTQGAMPAFASAFQRRAGGVLVASHLQSFLEVSYRVLRHLAQP

SEQ ID NO: 653 - protein, 177 aa, homo sapiens
TPLGPASSLPQSFLLKCLEQVRKIQGDGAALQEKLVSECATYKLCHPEELVLLGHSLGIPWAPLSSCPSQALQLAGCLSQLHSGLFLYQGLLQALEGISPELGPTLDTLQLDVADFATTIWQQMEELGMAPALQSTQGAMPAFASAFQRRAGGVLVASHLQSFLEVSYRVLRHLAQP

SEQ ID NO: 654 - protein, 177 aa, homo sapiens
TPLGPASSLPQSFLLKCLEQVRKIQGDGAALQEKLVSECATYKLCHPEELVLLGHSLGIPWAPLSSCPSQALQLAGCLSQLHSGLFLYQGLLQALEGISPELGPTLDTLQLDVADFATTIWQQMEELGMAPALQATQGAMPAFASAFQRRAGGVLVASHLQSFLEVSYRVLRHLAQP

SEQ ID NO: 655 - protein, 177 aa, homo sapiens
TPLGPASSLPQSFLLKCLEQVRKIQGDGAALQEKLVSECATYKLCHPEELVLLGHSLGIPWAPLSSCPSQALQLAGCLSQLHSGLFLYQGLLQALEGISPELGPTLDTLQLDVADFATTIWQQMEELGMAPALQPTQGAMPAFASAIQRRAGGVLVASHLQSFLEVSYRVLRHLAQP

SEQ ID NO: 656 - protein, 177 aa, homo sapiens
TPLGPASSLPQSFLLKCLEQVRKIQGDGAALQEKLVSECATYKLCHPEELVLLGHSLGIPWAPLSSCPSQALQLAGCLSQLHSGLFLYQGLLQALEGISPELGPTLDTLQLDVADFATTIWQQMEELGMAPALQPTQGAMPAFASAVQRRAGGVLVASHLQSFLEVSYRVLRHLAQP

SEQ ID NO: 657 - protein, 177 aa, homo sapiens
TPLGPASSLPQSFLLKCLEQVRKIQGDGAALQEKLVSECATYKLCHPEELVLLGHSLGIPWAPLSSCPSQALQLAGCLSQLHSGLFLYQGLLQALEGISPELGPTLDTLQLDVADFATTIWQQMEELGMAPALQPTQGAMPAFASAFQRRAGGVLVASHLQSFLEVSYHVLRHLAQP

SEQ ID NO: 658 - protein, 177 aa, homo sapiens
TPLGPASSLPQSFLLKCLEQVRKIQGDGAALQEKLVSECATYKLCHPEELVLLGHSLGIPWAPLSSCPSQALQLAGCLSQLHSGLFLYQGLLQALEGISPELGPTLDTLQLDVADFATTIWQQMEELGMAPALQPTQGAMPAFASAFQRRAGGVLVASHLQSFLEVSYQVLRHLAQP

SEQ ID NO: 659 - protein, 177 aa, homo sapiens
TPLGPASSLPQSFLLKCLEQVRKIQGDGAALQEKLVSECATYKLCHPEELVLLGHSLGIPWAPLSSCPSQALQLAGCLSQLHSGLFLYQGLLQALEGISPELGPTLDTLQLDVADFATTIWQQMEELGMAPALQPTQGAMPAFASAFQRRAGGVLVASHLQSFLEVSYRVLHHLAQP

SEQ ID NO: 660 - protein, 177 aa, homo sapiens
TPLGPASSLPQSFLLKCLEQVRKIQGDGAALQEKLVSECATYKLCHPEELVLLGHSLGIPWAPLSSCPSQALQLAGCLSQLHSGLFLYQGLLQALEGISPELGPTLDTLQLDVADFATTIWQQMEELGMAPALQPTQGAMPAFASAFQRRAGGVLVASHLQSFLEVSYRVLQHLAQP

SEQ ID NO: 661 - protein, 177 aa, homo sapiens
TPLGPASSLPQSFLLKCLEQVRKIQGDGAALQEKLVSECATYKLCHPEELVLLGHSLGIPWAPLSSCPSQALQLAGCLSQLHSGLFLYQGLLQALEGISPELGPTLDTLQLDVADFATTIWQQMEELGMAPALQPTQGAMPAFASAFQRRAGGVLVASHLQSFLEVSYRVLRHLAQS

SEQ ID NO: 662 - protein, 177 aa, homo sapiens
TPLGPASSLPQSFLLKCLEQVRKIQGDGAALQEKLVSECATYKLCHPEELVLLGHSLGIPWAPLSSCPSQALQLAGCLSQLHSGLFLYQGLLQALEGISPELGPTLDTLQLDVADFATTIWQQMEELGMAPALQPTQGAMPAFASAFQRRAGGVLVASHLQSFLEVSYRVLRHLAQA

SEQ ID NO: 663-849 - skipped (187 entries)

SEQ ID NO: 850 - protein, 191 aa, Homo sapiens
FPTIPLSRLFDNAMLRAHRLHQLAFDTYQEFEEAYIPKEQKYSFLQNPQTSLCFSQSIPTPSNREETQQKSNLELLRISLLLIQSWLEPVQFLRSVFANSLVYGASDSNVYDLLKDLEEGIQTLMGRLEDGSPRTGQIFKQTYSKFDTNSHNDDALLKNYGLLYCFRKDMDKVETFLRIVQCRSVEGSCGF

SEQ ID NO: 851 - protein, 191 aa, Homo sapiens
FPTIPLSRLFDNAMLRAHRLHQLAFDTYQEFEEAYIPKEQKYSFLQNPQTSLCFSNSIPTPSNREETQQKSNLELLRISLLLIQSWLEPVQFLRSVFANSLVYGASDSNVYDLLKDLEEGIQTLMGRLEDGSPRTGQIFKQTYSKFDTNSHNDDALLKNYGLLYCFRKDMDKVETFLRIVQCRSVEGSCGF

SEQ ID NO: 852 - protein, 191 aa, Homo sapiens
FPTIPLSRLFDNAMLRAHRLHQLAFDTYQEFEEAYIPKEQKYSFLQNPQTSLCFSHSIPTPSNREETQQKSNLELLRISLLLIQSWLEPVQFLRSVFANSLVYGASDSNVYDLLKDLEEGIQTLMGRLEDGSPRTGQIFKQTYSKFDTNSHNDDALLKNYGLLYCFRKDMDKVETFLRIVQCRSVEGSCGF

SEQ ID NO: 853 - protein, 191 aa, Homo sapiens
FPTIPLSRLFDNAMLRAHRLHQLAFDTYQEFEEAYIPKEQKYSFLQNPQTSLCFSESISTPSNREETQQKSNLELLRISLLLIQSWLEPVQFLRSVFANSLVYGASDSNVYDLLKDLEEGIQTLMGRLEDGSPRTGQIFKQTYSKFDTNSHNDDALLKNYGLLYCFRKDMDKVETFLRIVQCRSVEGSCGF

SEQ ID NO: 854 - protein, 191 aa, Homo sapiens
FPTIPLSRLFDNAMLRAHRLHQLAFDTYQEFEEAYIPKEQKYSFLQNPQTSLCFSESIATPSNREETQQKSNLELLRISLLLIQSWLEPVQFLRSVFANSLVYGASDSNVYDLLKDLEEGIQTLMGRLEDGSPRTGQIFKQTYSKFDTNSHNDDALLKNYGLLYCFRKDMDKVETFLRIVQCRSVEGSCGF

SEQ ID NO: 855 - protein, 191 aa, Homo sapiens
FPTIPLSRLFDNAMLRAHRLHQLAFDTYQEFEEAYIPKEQKYSFLQNPQTSLCFSESIPTPSNHEETQQKSNLELLRISLLLIQSWLEPVQFLRSVFANSLVYGASDSNVYDLLKDLEEGIQTLMGRLEDGSPRTGQIFKQTYSKFDTNSHNDDALLKNYGLLYCFRKDMDKVETFLRIVQCRSVEGSCGF

SEQ ID NO: 856 - protein, 191 aa, Homo sapiens
FPTIPLSRLFDNAMLRAHRLHQLAFDTYQEFEEAYIPKEQKYSFLQNPQTSLCFSESIPTPSNQEETQQKSNLELLRISLLLIQSWLEPVQFLRSVFANSLVYGASDSNVYDLLKDLEEGIQTLMGRLEDGSPRTGQIFKQTYSKFDTNSHNDDALLKNYGLLYCFRKDMDKVETFLRIVQCRSVEGSCGF

SEQ ID NO: 857 - protein, 191 aa, Homo sapiens
FPTIPLSRLFDNAMLRAHRLHQLAFDTYQEFEEAYIPKEQKYSFLQNPQTSLCFSESIPTPSNRQETQQKSNLELLRISLLLIQSWLEPVQFLRSVFANSLVYGASDSNVYDLLKDLEEGIQTLMGRLEDGSPRTGQIFKQTYSKFDTNSHNDDALLKNYGLLYCFRKDMDKVETFLRIVQCRSVEGSCGF

SEQ ID NO: 858 - protein, 191 aa, Homo sapiens
FPTIPLSRLFDNAMLRAHRLHQLAFDTYQEFEEAYIPKEQKYSFLQNPQTSLCFSESIPTPSNRNETQQKSNLELLRISLLLIQSWLEPVQFLRSVFANSLVYGASDSNVYDLLKDLEEGIQTLMGRLEDGSPRTGQIFKQTYSKFDTNSHNDDALLKNYGLLYCFRKDMDKVETFLRIVQCRSVEGSCGF

SEQ ID NO: 859 - protein, 191 aa, Homo sapiens
FPTIPLSRLFDNAMLRAHRLHQLAFDTYQEFEEAYIPKEQKYSFLQNPQTSLCFSESIPTPSNRHETQQKSNLELLRISLLLIQSWLEPVQFLRSVFANSLVYGASDSNVYDLLKDLEEGIQTLMGRLEDGSPRTGQIFKQTYSKFDTNSHNDDALLKNYGLLYCFRKDMDKVETFLRIVQCRSVEGSCGF

SEQ ID NO: 860 - protein, 191 aa, Homo sapiens
FPTIPLSRLFDNAMLRAHRLHQLAFDTYQEFEEAYIPKEQKYSFLQNPQTSLCFSESIPTPSNREQTQQKSNLELLRISLLLIQSWLEPVQFLRSVFANSLVYGASDSNVYDLLKDLEEGIQTLMGRLEDGSPRTGQIFKQTYSKFDTNSHNDDALLKNYGLLYCFRKDMDKVETFLRIVQCRSVEGSCGF

SEQ ID NO: 861 - protein, 191 aa, Homo sapiens
FPTIPLSRLFDNAMLRAHRLHQLAFDTYQEFEEAYIPKEQKYSFLQNPQTSLCFSESIPTPSNRENTQQKSNLELLRISLLLIQSWLEPVQFLRSVFANSLVYGASDSNVYDLLKDLEEGIQTLMGRLEDGSPRTGQIFKQTYSKFDTNSHNDDALLKNYGLLYCFRKDMDKVETFLRIVQCRSVEGSCGF

SEQ ID NO: 862 - protein, 191 aa, Homo sapiens
FPTIPLSRLFDNAMLRAHRLHQLAFDTYQEFEEAYIPKEQKYSFLQNPQTSLCFSESIPTPSNREHTQQKSNLELLRISLLLIQSWLEPVQFLRSVFANSLVYGASDSNVYDLLKDLEEGIQTLMGRLEDGSPRTGQIFKQTYSKFDTNSHNDDALLKNYGLLYCFRKDMDKVETFLRIVQCRSVEGSCGF

SEQ ID NO: 863 - protein, 191 aa, Homo sapiens
FPTIPLSRLFDNAMLRAHRLHQLAFDTYQEFEEAYIPKEQKYSFLQNPQTSLCFSESIPTPSNREETQQKSNLELLRISLLLIQSWLQPVQFLRSVFANSLVYGASDSNVYDLLKDLEEGIQTLMGRLEDGSPRTGQIFKQTYSKFDTNSHNDDALLKNYGLLYCFRKDMDKVETFLRIVQCRSVEGSCGF

SEQ ID NO: 864 - protein, 191 aa, Homo sapiens
FPTIPLSRLFDNAMLRAHRLHQLAFDTYQEFEEAYIPKEQKYSFLQNPQTSLCFSESIPTPSNREETQQKSNLELLRISLLLIQSWLNPVQFLRSVFANSLVYGASDSNVYDLLKDLEEGIQTLMGRLEDGSPRTGQIFKQTYSKFDTNSHNDDALLKNYGLLYCFRKDMDKVETFLRIVQCRSVEGSCGF

SEQ ID NO: 865 - protein, 191 aa, Homo sapiens
FPTIPLSRLFDNAMLRAHRLHQLAFDTYQEFEEAYIPKEQKYSFLQNPQTSLCFSESIPTPSNREETQQKSNLELLRISLLLIQSWLHPVQFLRSVFANSLVYGASDSNVYDLLKDLEEGIQTLMGRLEDGSPRTGQIFKQTYSKFDTNSHNDDALLKNYGLLYCFRKDMDKVETFLRIVQCRSVEGSCGF

SEQ ID NO: 866 - protein, 191 aa, Homo sapiens
FPTIPLSRLFDNAMLRAHRLHQLAFDTYQEFEEAYIPKEQKYSFLQNPQTSLCFSESIPTPSNREETQQKSNLELLRISLLLIQSWLEPVQILRSVFANSLVYGASDSNVYDLLKDLEEGIQTLMGRLEDGSPRTGQIFKQTYSKFDTNSHNDDALLKNYGLLYCFRKDMDKVETFLRIVQCRSVEGSCGF

SEQ ID NO: 867 - protein, 191 aa, Homo sapiens
FPTIPLSRLFDNAMLRAHRLHQLAFDTYQEFEEAYIPKEQKYSFLQNPQTSLCFSESIPTPSNREETQQKSNLELLRISLLLIQSWLEPVQVLRSVFANSLVYGASDSNVYDLLKDLEEGIQTLMGRLEDGSPRTGQIFKQTYSKFDTNSHNDDALLKNYGLLYCFRKDMDKVETFLRIVQCRSVEGSCGF

SEQ ID NO: 868 - protein, 191 aa, Homo sapiens
FPTIPLSRLFDNAMLRAHRLHQLAFDTYQEFEEAYIPKEQKYSFLQNPQTSLCFSESIPTPSNREETQQKSNLELLRISLLLIQSWLEPVQFLHSVFANSLVYGASDSNVYDLLKDLEEGIQTLMGRLEDGSPRTGQIFKQTYSKFDTNSHNDDALLKNYGLLYCFRKDMDKVETFLRIVQCRSVEGSCGF

SEQ ID NO: 869 - protein, 191 aa, Homo sapiens
FPTIPLSRLFDNAMLRAHRLHQLAFDTYQEFEEAYIPKEQKYSFLQNPQTSLCFSESIPTPSNREETQQKSNLELLRISLLLIQSWLEPVQFLQSVFANSLVYGASDSNVYDLLKDLEEGIQTLMGRLEDGSPRTGQIFKQTYSKFDTNSHNDDALLKNYGLLYCFRKDMDKVETFLRIVQCRSVEGSCGF

SEQ ID NO: 870 - protein, 191 aa, Homo sapiens
FPTIPLSRLFDNAMLRAHRLHQLAFDTYQEFEEAYIPKEQKYSFLQNPQTSLCFSESIPTPSNREETQQKSNLELLRISLLLIQSWLEPVQFLRSVFANSVVYGASDSNVYDLLKDLEEGIQTLMGRLEDGSPRTGQIFKQTYSKFDTNSHNDDALLKNYGLLYCFRKDMDKVETFLRIVQCRSVEGSCGF

SEQ ID NO: 871 - protein, 191 aa, Homo sapiens
FPTIPLSRLFDNAMLRAHRLHQLAFDTYQEFEEAYIPKEQKYSFLQNPQTSLCFSESIPTPSNREETQQKSNLELLRISLLLIQSWLEPVQFLRSVFANSIVYGASDSNVYDLLKDLEEGIQTLMGRLEDGSPRTGQIFKQTYSKFDTNSHNDDALLKNYGLLYCFRKDMDKVETFLRIVQCRSVEGSCGF

SEQ ID NO: 872 - protein, 191 aa, Homo sapiens
FPTIPLSRLFDNAMLRAHRLHQLAFDTYQEFEEAYIPKEQKYSFLQNPQTSLCFSESIPTPSNREETQQKSNLELLRISLLLIQSWLEPVQFLRSVFANSLVYGASDSNVYDLLKDLEEGIQTLMGRLQDGSPRTGQIFKQTYSKFDTNSHNDDALLKNYGLLYCFRKDMDKVETFLRIVQCRSVEGSCGF

SEQ ID NO: 873 - protein, 191 aa, Homo sapiens
FPTIPLSRLFDNAMLRAHRLHQLAFDTYQEFEEAYIPKEQKYSFLQNPQTSLCFSESIPTPSNREETQQKSNLELLRISLLLIQSWLEPVQFLRSVFANSLVYGASDSNVYDLLKDLEEGIQTLMGRLNDGSPRTGQIFKQTYSKFDTNSHNDDALLKNYGLLYCFRKDMDKVETFLRIVQCRSVEGSCGF

SEQ ID NO: 874 - protein, 191 aa, Homo sapiens
FPTIPLSRLFDNAMLRAHRLHQLAFDTYQEFEEAYIPKEQKYSFLQNPQTSLCFSESIPTPSNREETQQKSNLELLRISLLLIQSWLEPVQFLRSVFANSLVYGASDSNVYDLLKDLEEGIQTLMGRLHDGSPRTGQIFKQTYSKFDTNSHNDDALLKNYGLLYCFRKDMDKVETFLRIVQCRSVEGSCGF

SEQ ID NO: 875 - protein, 191 aa, Homo sapiens
FPTIPLSRLFDNAMLRAHRLHQLAFDTYQEFEEAYIPKEQKYSFLQNPQTSLCFSESIPTPSNREETQQKSNLELLRISLLLIQSWLEPVQFLRSVFANSLVYGASDSNVYDLLKDLEEGIQTLMGRLEQGSPRTGQIFKQTYSKFDTNSHNDDALLKNYGLLYCFRKDMDKVETFLRIVQCRSVEGSCGF

SEQ ID NO: 876 - protein, 191 aa, Homo sapiens
FPTIPLSRLFDNAMLRAHRLHQLAFDTYQEFEEAYIPKEQKYSFLQNPQTSLCFSESIPTPSNREETQQKSNLELLRISLLLIQSWLEPVQFLRSVFANSLVYGASDSNVYDLLKDLEEGIQTLMGRLENGSPRTGQIFKQTYSKFDTNSHNDDALLKNYGLLYCFRKDMDKVETFLRIVQCRSVEGSCGF

SEQ ID NO: 877 - protein, 191 aa, Homo sapiens
FPTIPLSRLFDNAMLRAHRLHQLAFDTYQEFEEAYIPKEQKYSFLQNPQTSLCFSESIPTPSNREETQQKSNLELLRISLLLIQSWLEPVQFLRSVFANSLVYGASDSNVYDLLKDLEEGIQTLMGRLEDGSSRTGQIFKQTYSKFDTNSHNDDALLKNYGLLYCFRKDMDKVETFLRIVQCRSVEGSCGF

SEQ ID NO: 878 - protein, 191 aa, Homo sapiens
FPTIPLSRLFDNAMLRAHRLHQLAFDTYQEFEEAYIPKEQKYSFLQNPQTSLCFSESIPTPSNREETQQKSNLELLRISLLLIQSWLEPVQFLRSVFANSLVYGASDSNVYDLLKDLEEGIQTLMGRLEDGSARTGQIFKQTYSKFDTNSHNDDALLKNYGLLYCFRKDMDKVETFLRIVQCRSVEGSCGF

SEQ ID NO: 879 - protein, 191 aa, Homo sapiens
FPTIPLSRLFDNAMLRAHRLHQLAFDTYQEFEEAYIPKEQKYSFLQNPQTSLCFSESIPTPSNREETQQKSNLELLRISLLLIQSWLEPVQFLRSVFANSLVYGASDSNVYDLLKDLEEGIQTLMGRLEDGSPHTGQIFKQTYSKFDTNSHNDDALLKNYGLLYCFRKDMDKVETFLRIVQCRSVEGSCGF

SEQ ID NO: 880 - protein, 191 aa, Homo sapiens
FPTIPLSRLFDNAMLRAHRLHQLAFDTYQEFEEAYIPKEQKYSFLQNPQTSLCFSESIPTPSNREETQQKSNLELLRISLLLIQSWLEPVQFLRSVFANSLVYGASDSNVYDLLKDLEEGIQTLMGRLEDGSPQTGQIFKQTYSKFDTNSHNDDALLKNYGLLYCFRKDMDKVETFLRIVQCRSVEGSCGF

SEQ ID NO: 881 - protein, 191 aa, Homo sapiens
FPTIPLSRLFDNAMLRAHRLHQLAFDTYQEFEEAYIPKEQKYSFLQNPQTSLCFSESIPTPSNREETQQKSNLELLRISLLLIQSWLEPVQFLRSVFANSLVYGASDSNVYDLLKDLEEGIQTLMGRLEDGSPRTGQIFQQTYSKFDTNSHNDDALLKNYGLLYCFRKDMDKVETFLRIVQCRSVEGSCGF

SEQ ID NO: 882 - protein, 191 aa, Homo sapiens
FPTIPLSRLFDNAMLRAHRLHQLAFDTYQEFEEAYIPKEQKYSFLQNPQTSLCFSESIPTPSNREETQQKSNLELLRISLLLIQSWLEPVQFLRSVFANSLVYGASDSNVYDLLKDLEEGIQTLMGRLEDGSPRTGQIFNQTYSKFDTNSHNDDALLKNYGLLYCFRKDMDKVETFLRIVQCRSVEGSCGF

SEQ ID NO: 883 - protein, 191 aa, Homo sapiens
FPTIPLSRLFDNAMLRAHRLHQLAFDTYQEFEEAYIPKEQKYSFLQNPQTSLCFSESIPTPSNREETQQKSNLELLRISLLLIQSWLEPVQFLRSVFANSLVYGASDSNVYDLLKDLEEGIQTLMGRLEDGSPRTGQIFKQTHSKFDTNSHNDDALLKNYGLLYCFRKDMDKVETFLRIVQCRSVEGSCGF

SEQ ID NO: 884 - protein, 191 aa, Homo sapiens
FPTIPLSRLFDNAMLRAHRLHQLAFDTYQEFEEAYIPKEQKYSFLQNPQTSLCFSESIPTPSNREETQQKSNLELLRISLLLIQSWLEPVQFLRSVFANSLVYGASDSNVYDLLKDLEEGIQTLMGRLEDGSPRTGQIFKQTISKFDTNSHNDDALLKNYGLLYCFRKDMDKVETFLRIVQCRSVEGSCGF

SEQ ID NO: 885 - protein, 191 aa, Homo sapiens
FPTIPLSRLFDNAMLRAHRLHQLAFDTYQEFEEAYIPKEQKYSFLQNPQTSLCFSESIPTPSNREETQQKSNLELLRISLLLIQSWLEPVQFLRSVFANSLVYGASDSNVYDLLKDLEEGIQTLMGRLEDGSPRTGQIFKQTYSQFDTNSHNDDALLKNYGLLYCFRKDMDKVETFLRIVQCRSVEGSCGF

SEQ ID NO: 886 - protein, 191 aa, Homo sapiens
FPTIPLSRLFDNAMLRAHRLHQLAFDTYQEFEEAYIPKEQKYSFLQNPQTSLCFSESIPTPSNREETQQKSNLELLRISLLLIQSWLEPVQFLRSVFANSLVYGASDSNVYDLLKDLEEGIQTLMGRLEDGSPRTGQIFKQTYSNFDTNSHNDDALLKNYGLLYCFRKDMDKVETFLRIVQCRSVEGSCGF

SEQ ID NO: 887 - protein, 191 aa, Homo sapiens
FPTIPLSRLFDNAMLRAHRLHQLAFDTYQEFEEAYIPKEQKYSFLQNPQTSLCFSESIPTPSNREETQQKSNLELLRISLLLIQSWLEPVQFLRSVFANSLVYGASDSNVYDLLKDLEEGIQTLMGRLEDGSPRTGQIFKQTYSKIDTNSHNDDALLKNYGLLYCFRKDMDKVETFLRIVQCRSVEGSCGF

SEQ ID NO: 888 - protein, 191 aa, Homo sapiens
FPTIPLSRLFDNAMLRAHRLHQLAFDTYQEFEEAYIPKEQKYSFLQNPQTSLCFSESIPTPSNREETQQKSNLELLRISLLLIQSWLEPVQFLRSVFANSLVYGASDSNVYDLLKDLEEGIQTLMGRLEDGSPRTGQIFKQTYSKVDTNSHNDDALLKNYGLLYCFRKDMDKVETFLRIVQCRSVEGSCGF

SEQ ID NO: 889 - protein, 191 aa, Homo sapiens
FPTIPLSRLFDNAMLRAHRLHQLAFDTYQEFEEAYIPKEQKYSFLQNPQTSLCFSESIPTPSNREETQQKSNLELLRISLLLIQSWLEPVQFLRSVFANSLVYGASDSNVYDLLKDLEEGIQTLMGRLEDGSPRTGQIFKQTYSKFQTNSHNDDALLKNYGLLYCFRKDMDKVETFLRIVQCRSVEGSCGF

SEQ ID NO: 890 - protein, 191 aa, Homo sapiens
FPTIPLSRLFDNAMLRAHRLHQLAFDTYQEFEEAYIPKEQKYSFLQNPQTSLCFSESIPTPSNREETQQKSNLELLRISLLLIQSWLEPVQFLRSVFANSLVYGASDSNVYDLLKDLEEGIQTLMGRLEDGSPRTGQIFKQTYSKFNTNSHNDDALLKNYGLLYCFRKDMDKVETFLRIVQCRSVEGSCGF

SEQ ID NO: 891 - protein, 191 aa, Homo sapiens
FPTIPLSRLFDNAMLRAHRLHQLAFDTYQEFEEAYIPKEQKYSFLQNPQTSLCFSESIPTPSNREETQQKSNLELLRISLLLIQSWLEPVQFLRSVFANSLVYGASDSNVYDLLKDLEEGIQTLMGRLEDGSPRTGQIFKQTYSKFDTNSHNDDALLKNYGLLYCFRKDMDKVETFLRIVQCHSVEGSCGF

SEQ ID NO: 892 - protein, 191 aa, Homo sapiens
FPTIPLSRLFDNAMLRAHRLHQLAFDTYQEFEEAYIPKEQKYSFLQNPQTSLCFSESIPTPSNREETQQKSNLELLRISLLLIQSWLEPVQFLRSVFANSLVYGASDSNVYDLLKDLEEGIQTLMGRLEDGSPRTGQIFKQTYSKFDTNSHNDDALLKNYGLLYCFRKDMDKVETFLRIVQCQSVEGSCGF

SEQ ID NO: 893 - protein, 191 aa, Homo sapiens
FPTIPLSRLFDNAMLRAHRLHQLAFDTYQEFEEAYIPKEQKYSFLQNPQTSLCFSESIPTPSNREETQQKSNLELLRISLLLIQSWLEPVQFLRSVFANSLVYGASDSNVYDLLKDLEEGIQTLMGRLEDGSPRTGQIFKQTYSKFDTNSHNDDALLKNYGLLYCFRKDMDKVETFLRIVQCRSVQGSCGF

SEQ ID NO: 894 - protein, 191 aa, Homo sapiens
FPTIPLSRLFDNAMLRAHRLHQLAFDTYQEFEEAYIPKEQKYSFLQNPQTSLCFSESIPTPSNREETQQKSNLELLRISLLLIQSWLEPVQFLRSVFANSLVYGASDSNVYDLLKDLEEGIQTLMGRLEDGSPRTGQIFKQTYSKFDTNSHNDDALLKNYGLLYCFRKDMDKVETFLRIVQCRSVNGSCGF

SEQ ID NO: 895 - protein, 191 aa, Homo sapiens
FPTIPLSRLFDNAMLRAHRLHQLAFDTYQEFEEAYIPKEQKYSFLQNPQTSLCFSESIPTPSNREETQQKSNLELLRISLLLIQSWLEPVQFLRSVFANSLVYGASDSNVYDLLKDLEEGIQTLMGRLEDGSPRTGQIFKQTYSKFDTNSHNDDALLKNYGLLYCFRKDMDKVETFLRIVQCRSVHGSCGF

SEQ ID NO: 896-939 - skipped (44 entries)

SEQ ID NO: 940 - protein, 166 aa, Homo sapiens
APPRLICDSRVLERYLLEAKEAENITTGCAEHCSLNENITVPQTKVNFYAWKRMEVGQQAVEVWQGLALLSEAVLRGQALLVNSSQPWEPLQLHVDKAVSGLRSLTTLLRALGAQKEAISPPDAASAAPLRTITADTFRKLFRVYSNFLRGKLKLYTGEACRTGDR

SEQ ID NO: 941 - protein, 166 aa, Homo sapiens
APPRLICDSRVLERYLLEAKEAENITTGCAEHCSLNENITVPNTKVNFYAWKRMEVGQQAVEVWQGLALLSEAVLRGQALLVNSSQPWEPLQLHVDKAVSGLRSLTTLLRALGAQKEAISPPDAASAAPLRTITADTFRKLFRVYSNFLRGKLKLYTGEACRTGDR

SEQ ID NO: 942 - protein, 166 aa, Homo sapiens
APPRLICDSRVLERYLLEAKEAENITTGCAEHCSLNENITVPDTQVNFYAWKRMEVGQQAVEVWQGLALLSEAVLRGQALLVNSSQPWEPLQLHVDKAVSGLRSLTTLLRALGAQKEAISPPDAASAAPLRTITADTFRKLFRVYSNFLRGKLKLYTGEACRTGDR

SEQ ID NO: 943 - protein, 166 aa, Homo sapiens
APPRLICDSRVLERYLLEAKEAENITTGCAEHCSLNENITVPDTNVNFYAWKRMEVGQQAVEVWQGLALLSEAVLRGQALLVNSSQPWEPLQLHVDKAVSGLRSLTTLLRALGAQKEAISPPDAASAAPLRTITADTFRKLFRVYSNFLRGKLKLYTGEACRTGDR

SEQ ID NO: 944 - protein, 166 aa, Homo sapiens
APPRLICDSRVLERYLLEAKEAENITTGCAEHCSLNENITVPDTKVNIYAWKRMEVGQQAVEVWQGLALLSEAVLRGQALLVNSSQPWEPLQLHVDKAVSGLRSLTTLLRALGAQKEAISPPDAASAAPLRTITADTFRKLFRVYSNFLRGKLKLYTGEACRTGDR

SEQ ID NO: 945 - protein, 166 aa, Homo sapiens
APPRLICDSRVLERYLLEAKEAENITTGCAEHCSLNENITVPDTKVNVYAWKRMEVGQQAVEVWQGLALLSEAVLRGQALLVNSSQPWEPLQLHVDKAVSGLRSLTTLLRALGAQKEAISPPDAASAAPLRTITADTFRKLFRVYSNFLRGKLKLYTGEACRTGDR

SEQ ID NO: 946 - protein, 166 aa, Homo sapiens
APPRLICDSRVLERYLLEAKEAENITTGCAEHCSLNENITVPDTKVNFHAWKRMEVGQQAVEVWQGLALLSEAVLRGQALLVNSSQPWEPLQLHVDKAVSGLRSLTTLLRALGAQKEAISPPDAASAAPLRTITADTFRKLFRVYSNFLRGKLKLYTGEACRTGDR

SEQ ID NO: 947 - protein, 166 aa, Homo sapiens
APPRLICDSRVLERYLLEAKEAENITTGCAEHCSLNENITVPDTKVNFIAWKRMEVGQQAVEVWQGLALLSEAVLRGQALLVNSSQPWEPLQLHVDKAVSGLRSLTTLLRALGAQKEAISPPDAASAAPLRTITADTFRKLFRVYSNFLRGKLKLYTGEACRTGDR

SEQ ID NO: 948 - protein, 166 aa, Homo sapiens
APPRLICDSRVLERYLLEAKEAENITTGCAEHCSLNENITVPDTKVNFYAWQRMEVGQQAVEVWQGLALLSEAVLRGQALLVNSSQPWEPLQLHVDKAVSGLRSLTTLLRALGAQKEAISPPDAASAAPLRTITADTFRKLFRVYSNFLRGKLKLYTGEACRTGDR

SEQ ID NO: 949 - protein, 166 aa, Homo sapiens
APPRLICDSRVLERYLLEAKEAENITTGCAEHCSLNENITVPDTKVNFYAWNRMEVGQQAVEVWQGLALLSEAVLRGQALLVNSSQPWEPLQLHVDKAVSGLRSLTTLLRALGAQKEAISPPDAASAAPLRTITADTFRKLFRVYSNFLRGKLKLYTGEACRTGDR

SEQ ID NO: 950 - protein, 166 aa, Homo sapiens
APPRLICDSRVLERYLLEAKEAENITTGCAEHCSLNENITVPDTKVNFYAWKHMEVGQQAVEVWQGLALLSEAVLRGQALLVNSSQPWEPLQLHVDKAVSGLRSLTTLLRALGAQKEAISPPDAASAAPLRTITADTFRKLFRVYSNFLRGKLKLYTGEACRTGDR

SEQ ID NO: 951 - protein, 166 aa, Homo sapiens
APPRLICDSRVLERYLLEAKEAENITTGCAEHCSLNENITVPDTKVNFYAWKQMEVGQQAVEVWQGLALLSEAVLRGQALLVNSSQPWEPLQLHVDKAVSGLRSLTTLLRALGAQKEAISPPDAASAAPLRTITADTFRKLFRVYSNFLRGKLKLYTGEACRTGDR

SEQ ID NO: 952 - protein, 166 aa, Homo sapiens
APPRLICDSRVLERYLLEAKEAENITTGCAEHCSLNENITVPDTKVNFYAWKRMQVGQQAVEVWQGLALLSEAVLRGQALLVNSSQPWEPLQLHVDKAVSGLRSLTTLLRALGAQKEAISPPDAASAAPLRTITADTFRKLFRVYSNFLRGKLKLYTGEACRTGDR

SEQ ID NO: 953 - protein, 166 aa, Homo sapiens
APPRLICDSRVLERYLLEAKEAENITTGCAEHCSLNENITVPDTKVNFYAWKRMNVGQQAVEVWQGLALLSEAVLRGQALLVNSSQPWEPLQLHVDKAVSGLRSLTTLLRALGAQKEAISPPDAASAAPLRTITADTFRKLFRVYSNFLRGKLKLYTGEACRTGDR

SEQ ID NO: 954 - protein, 166 aa, Homo sapiens
APPRLICDSRVLERYLLEAKEAENITTGCAEHCSLNENITVPDTKVNFYAWKRMHVGQQAVEVWQGLALLSEAVLRGQALLVNSSQPWEPLQLHVDKAVSGLRSLTTLLRALGAQKEAISPPDAASAAPLRTITADTFRKLFRVYSNFLRGKLKLYTGEACRTGDR

SEQ ID NO: 955 - protein, 166 aa, Homo sapiens
APPRLICDSRVLERYLLEAKEAENITTGCAEHCSLNENITVPDTKVNFYAWKRMEVGQQAVEVWQGLALLSQAVLRGQALLVNSSQPWEPLQLHVDKAVSGLRSLTTLLRALGAQKEAISPPDAASAAPLRTITADTFRKLFRVYSNFLRGKLKLYTGEACRTGDR

SEQ ID NO: 956 - protein, 166 aa, Homo sapiens
APPRLICDSRVLERYLLEAKEAENITTGCAEHCSLNENITVPDTKVNFYAWKRMEVGQQAVEVWQGLALLSNAVLRGQALLVNSSQPWEPLQLHVDKAVSGLRSLTTLLRALGAQKEAISPPDAASAAPLRTITADTFRKLFRVYSNFLRGKLKLYTGEACRTGDR

SEQ ID NO: 957 - protein, 166 aa, Homo sapiens
APPRLICDSRVLERYLLEAKEAENITTGCAEHCSLNENITVPDTKVNFYAWKRMEVGQQAVEVWQGLALLSHAVLRGQALLVNSSQPWEPLQLHVDKAVSGLRSLTTLLRALGAQKEAISPPDAASAAPLRTITADTFRKLFRVYSNFLRGKLKLYTGEACRTGDR

SEQ ID NO: 958 - protein, 166 aa, Homo sapiens
APPRLICDSRVLERYLLEAKEAENITTGCAEHCSLNENITVPDTKVNFYAWKRMEVGQQAVEVWQGLALLSEAVVRGQALLVNSSQPWEPLQLHVDKAVSGLRSLTTLLRALGAQKEAISPPDAASAAPLRTITADTFRKLFRVYSNFLRGKLKLYTGEACRTGDR

SEQ ID NO: 959 - protein, 166 aa, Homo sapiens
APPRLICDSRVLERYLLEAKEAENITTGCAEHCSLNENITVPDTKVNFYAWKRMEVGQQAVEVWQGLALLSEAVIRGQALLVNSSQPWEPLQLHVDKAVSGLRSLTTLLRALGAQKEAISPPDAASAAPLRTITADTFRKLFRVYSNFLRGKLKLYTGEACRTGDR

SEQ ID NO: 960 - protein, 166 aa, Homo sapiens
APPRLICDSRVLERYLLEAKEAENITTGCAEHCSLNENITVPDTKVNFYAWKRMEVGQQAVEVWQGLALLSEAVLHGQALLVNSSQPWEPLQLHVDKAVSGLRSLTTLLRALGAQKEAISPPDAASAAPLRTITADTFRKLFRVYSNFLRGKLKLYTGEACRTGDR

SEQ ID NO: 961 - protein, 166 aa, Homo sapiens
APPRLICDSRVLERYLLEAKEAENITTGCAEHCSLNENITVPDTKVNFYAWKRMEVGQQAVEVWQGLALLSEAVLQGQALLVNSSQPWEPLQLHVDKAVSGLRSLTTLLRALGAQKEAISPPDAASAAPLRTITADTFRKLFRVYSNFLRGKLKLYTGEACRTGDR

SEQ ID NO: 962 - protein, 166 aa, Homo sapiens
APPRLICDSRVLERYLLEAKEAENITTGCAEHCSLNENITVPDTKVNFYAWKRMEVGQQAVEVWQGLALLSEAVLRGQALLVNSSQPWEPLQLHVDKAVSGLRSLTTLLRALGAQKEAISPPQAASAAPLRTITADTFRKLFRVYSNFLRGKLKLYTGEACRTGDR

SEQ ID NO: 963 - protein, 166 aa, Homo sapiens
APPRLICDSRVLERYLLEAKEAENITTGCAEHCSLNENITVPDTKVNFYAWKRMEVGQQAVEVWQGLALLSEAVLRGQALLVNSSQPWEPLQLHVDKAVSGLRSLTTLLRALGAQKEAISPPNAASAAPLRTITADTFRKLFRVYSNFLRGKLKLYTGEACRTGDR

SEQ ID NO: 964 - protein, 166 aa, Homo sapiens
APPRLICDSRVLERYLLEAKEAENITTGCAEHCSLNENITVPDTKVNFYAWKRMEVGQQAVEVWQGLALLSEAVLRGQALLVNSSQPWEPLQLHVDKAVSGLRSLTTLLRALGAQKEAISPPDAASAASLRTITADTFRKLFRVYSNFLRGKLKLYTGEACRTGDR

SEQ ID NO: 965 - protein, 166 aa, Homo sapiens
APPRLICDSRVLERYLLEAKEAENITTGCAEHCSLNENITVPDTKVNFYAWKRMEVGQQAVEVWQGLALLSEAVLRGQALLVNSSQPWEPLQLHVDKAVSGLRSLTTLLRALGAQKEAISPPDAASAAALRTITADTFRKLFRVYSNFLRGKLKLYTGEACRTGDR

SEQ ID NO: 966 - protein, 166 aa, Homo sapiens
APPRLICDSRVLERYLLEAKEAENITTGCAEHCSLNENITVPDTKVNFYAWKRMEVGQQAVEVWQGLALLSEAVLRGQALLVNSSQPWEPLQLHVDKAVSGLRSLTTLLRALGAQKEAISPPDAASAAPVRTITADTFRKLFRVYSNFLRGKLKLYTGEACRTGDR

SEQ ID NO: 967 - protein, 166 aa, Homo sapiens
APPRLICDSRVLERYLLEAKEAENITTGCAEHCSLNENITVPDTKVNFYAWKRMEVGQQAVEVWQGLALLSEAVLRGQALLVNSSQPWEPLQLHVDKAVSGLRSLTTLLRALGAQKEAISPPDAASAAPIRTITADTFRKLFRVYSNFLRGKLKLYTGEACRTGDR

SEQ ID NO: 968 - protein, 166 aa, Homo sapiens
APPRLICDSRVLERYLLEAKEAENITTGCAEHCSLNENITVPDTKVNFYAWKRMEVGQQAVEVWQGLALLSEAVLRGQALLVNSSQPWEPLQLHVDKAVSGLRSLTTLLRALGAQKEAISPPDAASAAPLHTITADTFRKLFRVYSNFLRGKLKLYTGEACRTGDR

SEQ ID NO: 969 - protein, 166 aa, Homo sapiens
APPRLICDSRVLERYLLEAKEAENITTGCAEHCSLNENITVPDTKVNFYAWKRMEVGQQAVEVWQGLALLSEAVLRGQALLVNSSQPWEPLQLHVDKAVSGLRSLTTLLRALGAQKEAISPPDAASAAPLQTITADTFRKLFRVYSNFLRGKLKLYTGEACRTGDR

SEQ ID NO: 970 - protein, 166 aa, Homo sapiens
APPRLICDSRVLERYLLEAKEAENITTGCAEHCSLNENITVPDTKVNFYAWKRMEVGQQAVEVWQGLALLSEAVLRGQALLVNSSQPWEPLQLHVDKAVSGLRSLTTLLRALGAQKEAISPPDAASAAPLRTITADTFRKLFRVYSNFLRGKLKLYTGEACHTGDR

SEQ ID NO: 971 - protein, 166 aa, Homo sapiens
APPRLICDSRVLERYLLEAKEAENITTGCAEHCSLNENITVPDTKVNFYAWKRMEVGQQAVEVWQGLALLSEAVLRGQALLVNSSQPWEPLQLHVDKAVSGLRSLTTLLRALGAQKEAISPPDAASAAPLRTITADTFRKLFRVYSNFLRGKLKLYTGEACQTGDR

SEQ ID NO: 972 - protein, 166 aa, Homo sapiens
APPRLICDSRVLERYLLEAKEAENITTGCAEHCSLNENITVPDTKVNFYAWKRMEVGQQAVEVWQGLALLSEAVLRGQALLVNSSQPWEPLQLHVDKAVSGLRSLTTLLRALGAQKEAISPPDAASAAPLRTITADTFRKLFRVYSNFLRGKLKLYTGEACRTGQR

SEQ ID NO: 973 - protein, 166 aa, Homo sapiens
APPRLICDSRVLERYLLEAKEAENITTGCAEHCSLNENITVPDTKVNFYAWKRMEVGQQAVEVWQGLALLSEAVLRGQALLVNSSQPWEPLQLHVDKAVSGLRSLTTLLRALGAQKEAISPPDAASAAPLRTITADTFRKLFRVYSNFLRGKLKLYTGEACRTGNR

SEQ ID NO: 974 - protein, 166 aa, Homo sapiens
APPRLICDSRVLERYLLEAKEAENITTGCAEHCSLNENITVPDTKVNFYAWKRMEVGQQAVEVWQGLALLSEAVLRGQALLVNSSQPWEPLQLHVDKAVSGLRSLTTLLRALGAQKEAISSPDAASAAPLRTITADTFRKLFRVYSNFLRGKLKLYTGEACHTGDR

SEQ ID NO: 975 - protein, 166 aa, Homo sapiens
APPRLICDSRVLERYLLEAKEAENITTGCAEHCSLNENITVPDTKVNFYAWKRMEVGQQAVEVWQGLALLSEAVLRGQALLVNSSQPWEPLQLHVDKAVSGLRSLTTLLRALGAQKEAISAPDAASAAPLRTITADTFRKLFRVYSNFLRGKLKLYTGEACQTGDR

SEQ ID NO: 976 - protein, 166 aa, Homo sapiens
APPRLICDSRVLERYLLEAKEAENITTGCAEHCSLNENITVPDTKVNFYAWKRMEVGQQAVEVWQGLALLSEAVLRGQALLVNSSQPWEPLQLHVDKAVSGLRSLTTLLRALGAQKEAISPSDAASAAPLRTITADTFRKLFRVYSNFLRGKLKLYTGEACRTGQR

SEQ ID NO: 977 - protein, 166 aa, Homo sapiens
APPRLICDSRVLERYLLEAKEAENITTGCAEHCSLNENITVPDTKVNFYAWKRMEVGQQAVEVWQGLALLSEAVLRGQALLVNSSQPWEPLQLHVDKAVSGLRSLTTLLRALGAQKEAISPADAASAAPLRTITADTFRKLFRVYSNFLRGKLKLYTGEACRTGNR

SEQ ID NO: 978 - protein, 165 aa, Homo sapiens
CDLPQTHSLGSRRTLMLLAQMRRISLFSCLKDRHDFGFPQEEFGNQFQKAETIPVLHEMIQQIFNLFSTKDSSAAWDETLLDKFYTELYQQLNDLEACVIQGVGVTETPLVKEDSILAVRKYFQRITLYLKEKKYSPCAWEVVRAEIMRSFSLSTNLPESLRSKE

SEQ ID NO: 979 - protein, 165 aa, Homo sapiens
CDLPQTHSLGSRRTLMLLAQMRRISLFSCLKDRHDFGFPQHEFGDQFQKAETIPVLHEMIQQIFNLFSTKDSSAAWDETLLDKFYTELHQQLNDLEACVIQGVGVTETPLMKEDSILAVRKYFQRITLYLKEKKYSPCAWEVVRAEIMRSFSLSTNLQESLRSKE

SEQ ID NO: 980 - protein, 165 aa, Homo sapiens
CDLPQTHSLGSRRTLMLLAQMRRISLFSCLKDRHDFGFPQQEFGNQFQKAETIPVLHEMIQQIFNLFSTKDSSAAWDETLLDKFYTELYQQLNGLEACVIQGVGVTETPLMKEDSILAVRKYFQRITLYLKEKKYSPCAWEVVRAEIMRSFSLSTNLQESLRSKE

SEQ ID NO: 981 - protein, 165 aa, Homo sapiens
CDLPQTHSLGSRRTLMLLAQMRRISLVSCLKDRHDFGFPQEEFGNQFQKAETIPVLHQMIQQIFNLFSTKDSSAAWDETLLDKFYTELYQQLNDLEACVIQGVGVTETPLMKEDSILAVRKYFQRITLYLKEKKYSPCAWEVVRAEIMRSFSLSTNLQESLRSKE

SEQ ID NO: 982 - protein, 165 aa, Homo sapiens
CDLPQTHSLGSRRTLMLLAQMRRISLFSCLKDHHDFGFPQEEFGNQFQKAETIPVLHHMIQQIFNLFSTKDSSAAWDHTLLDKFYTELYQQLNDLEACVIQGVGVTETPVMKEDSILAVRKYFQRITLYLKEKKYSPCAWEVVRAEIMRSFSLSTNLQESLRSKE

SEQ ID NO: 983 - protein, 165 aa, Homo sapiens
CDLPQTHSLGSRRTLMLLAQMRRISLFSCLKDRHDFGFPQEEFGNQFQKAETIPVLHEMIQQIFNLFSTKDSSAAWDETLLDKFYTELYQQLNDLEACVIQGVGVTETALMKEDSILAVRQYFQRITLYLKEKKYSPCAWEVVRAEIMRSFSLSTNLQESLRSKE

SEQ ID NO: 984 - protein, 165 aa, Homo sapiens
CDLPQTHSLGSRRTLMLLAQMRRISLFSCLKDRHDFGFPQEEFGNQFQKAETIPVLHEMIQQIFNLFSTKDSSAAWDETLLDKFYTELYQQLNDLEACVIQRVGVTETALMKEDSILAVRQYFQRITLYLKEQKYSPCAWEVVRAEIMRSFSLSTNLQESLRSKE

SEQ ID NO: 985 - protein, 165 aa, Homo sapiens
CDLPQTHSLGSRRTLMLLAQMRRISLFSCLKDRHDFGFPQEEFGNQFQKAETIPVLHEMIQQIFNLFSTKDSSAAWDETLLDKFYTELYQQLNDLEACVIQGVGVTETPLMKEDSIVAVRKYFQRITLYLKEKKYSPCGWEVVRAEIMRSFSLSTNLQESLRSKE

SEQ ID NO: 986 - protein, 165 aa, Homo sapiens
CDLPQTHSLGSRRTLMLLAQMRRISLFSCLKDRHDFGFPQEEFGNQFQKAETIPVLHEMIQQIFNLFSTKDSSAAWDETLLDKFYTELYQQLNDLEACVIQGVGVTETPLVKEDSILAVRKYFQHITLYLKEKKYSPCAWEVVRAEIMRSFSLSTNLPESLRSKE

SEQ ID NO: 987 - protein, 165 aa, Homo sapiens
CDLPQTHSLGSRRTLMLLAQMRRISLFSCLKDRHDFGFPQEEFGNQFQKAETIPVLHEMIQQIFNLFSTKDSSAAWDETLLDKFYTELHQQLNDLEACVIQGVGVTETPLMKEDSILAVRKYFQRITLYLKEKKYSPCAWEVVRAEIMRSFSLSTNLQHSLRSKE

SEQ ID NO: 988 - protein, 165 aa, Homo sapiens
CDLPQTHSLGSRRTLMLLAQMRRISLFSCLKDRHDFGFPQEEFGNQFQKAETIPVLHEMIQQIFNLFSTKDSSAAWDETLLDKFYTELYQQLNDLEACVIAGVGVTETPLMKEDSILAVRKYFQRITLYLKEKKYSPCAWEVVRAEIMRSFSLSTNLQESLRSKE

SEQ ID NO: 989 - protein, 166 aa, Homo sapiens
MSYNLLGFLQRSSNFQCQKLLWQLNGRLEYCLKDRMNFDIPEEIKQLQQFQKEDAALTIYEMLQNIFAIFRQDSSSTGWNETIVENLLANVYHQINHLKTVLEEKLEKEDFTRGKLMSSLHLTRYYGRILHYLKAKEYSHCAWTIVRVEILRNFYFINRLTGYLRN

SEQ ID NO: 990 - protein, 166 aa, Homo sapiens
MSYNLLGFLQRSSNFQCQKLLWQLNGRLEYCLKDRMNFDIPEEIKQLQQFQKEDAALTIYEMLQNIFAIFRQDSSSTGWNETIVENLLANVYHQINHLKTVLEEKLEKEDFTRGKLMSSLHLSRYYGRILHYLKAKEYSHCAWTIVRVEILRNFYFINRLTGYLRN

SEQ ID NO: 991 - protein, 166 aa, Homo sapiens
MSYNLLGFLQRSSNFQCQKLLWQLNGRLEYCLKDRMNFDIPEEIKQLQQFQKEDAALTIYEMLQNIFAIFRQDSSSTGWNETIVENLLANVYHQINHLKTVLEEKLEKEDFTRGKLMSSLHLHRYYGRILHYLKAKEYSHCAWTIVRVEILRNFYFINRLTGYLRN

SEQ ID NO: 992 - protein, 166 aa, Homo sapiens
MSYNLLGFLQRSSNFQCQKLLWQLNGRLEYCLKDRMNFDIPEEIKQLQQFQKEDAALTIYEMLQNIFAIFRQDSSSTGWNETIVENLLANVYHQINHLKTVLEEKLEKEDFTRGKLMSSLHLKHYYGRILHYLKAKEYSHCAWTIVRVEILRNFYFINRLTGYLRN

SEQ ID NO: 993 - protein, 166 aa, Homo sapiens
MSYNLLGFLQRSSNFQCQKLLWQLNGRLEYCLKDRMNFDIPEEIKQLQQFQKEDAALTIYEMLQNIFAIFRQDSSSTGWNETIVENLLANVYHQINHLKTVLEEKLEKEDFTRGKLMSSLHLKQYYGRILHYLKAKEYSHCAWTIVRVEILRNFYFINRLTGYLRN

SEQ ID NO: 994 - protein, 166 aa, Homo sapiens
MSYNLLGFLQRSSNFQCQKLLWQLNGRLEYCLKDRMNFDIPEEIKQLQQFQKEDAALTIYEMLQNIFAIFRQDSSSTGWNETIVENLLANVYHQINHLKTVLEEKLEKEDFTRGKLMSSLHLKRYYGHILHYLKAKEYSHCAWTIVRVEILRNFYFINRLTGYLRN

SEQ ID NO: 995 - protein, 166 aa, Homo sapiens
MSYNLLGFLQRSSNFQCQKLLWQLNGRLEYCLKDRMNFDIPEEIKQLQQFQKEDAALTIYEMLQNIFAIFRQDSSSTGWNETIVENLLANVYHQINHLKTVLEEKLEKEDFTRGKLMSSLHLKRYYGQILHYLKAKEYSHCAWTIVRVEILRNFYFINRLTGYLRN

SEQ ID NO: 996 - protein, 166 aa, Homo sapiens
MSYNLLGFLQRSSNFQCQKLLWQLNGRLEYCLKDRMNFDIPEEIKQLQQFQKEDAALTIYEMLQNIFAIFRQDSSSTGWNETIVENLLANVYHQINHLKTVLEEKLEKEDFTRGKLMSSLHLKRYYGRIVHYLKAKEYSHCAWTIVRVEILRNFYFINRLTGYLRN

SEQ ID NO: 997 - protein, 166 aa, Homo sapiens
MSYNLLGFLQRSSNFQCQKLLWQLNGRLEYCLKDRMNFDIPEEIKQLQQFQKEDAALTIYEMLQNIFAIFRQDSSSTGWNETIVENLLANVYHQINHLKTVLEEKLEKEDFTRGKLMSSLHLKRYYGRIIHYLKAKEYSHCAWTIVRVEILRNFYFINRLTGYLRN

SEQ ID NO: 998 - protein, 166 aa, Homo sapiens
MSYNLLGFLQRSSNFQCQKLLWQLNGRLEYCLKDRMNFDIPEEIKQLQQFQKEDAALTIYEMLQNIFAIFRQDSSSTGWNETIVENLLANVYHQINHLKTVLEEKLEKEDFTRGKLMSSLHLKRYYGRITHYLKAKEYSHCAWTIVRVEILRNFYFINRLTGYLRN

SEQ ID NO: 999 - protein, 166 aa, Homo sapiens
MSYNLLGFLQRSSNFQCQKLLWQLNGRLEYCLKDRMNFDIPEEIKQLQQFQKEDAALTIYEMLQNIFAIFRQDSSSTGWNETIVENLLANVYHQINHLKTVLEEKLEKEDFTRGKLMSSLHLKRYYGRIQHYLKAKEYSHCAWTIVRVEILRNFYFINRLTGYLRN

SEQ ID NO: 1000 - protein, 166 aa, Homo sapiens
MSYNLLGFLQRSSNFQCQKLLWQLNGRLEYCLKDRMNFDIPEEIKQLQQFQKEDAALTIYEMLQNIFAIFRQDSSSTGWNETIVENLLANVYHQINHLKTVLEEKLEKEDFTRGKLMSSLHLKRYYGRIHHYLKAKEYSHCAWTIVRVEILRNFYFINRLTGYLRN

SEQ ID NO: 1001 - protein, 166 aa, Homo sapiens
MSYNLLGFLQRSSNFQCQKLLWQLNGRLEYCLKDRMNFDIPEEIKQLQQFQKEDAALTIYEMLQNIFAIFRQDSSSTGWNETIVENLLANVYHQINHLKTVLEEKLEKEDFTRGKLMSSLHLKRYYGRIAHYLKAKEYSHCAWTIVRVEILRNFYFINRLTGYLRN

SEQ ID NO: 1002 - protein, 166 aa, Homo sapiens
MSYNLLGFLQRSSNFQCQKLLWQLNGRLEYCLKDRMNFDIPEEIKQLQQFQKEDAALTIYEMLQNIFAIFRQDSSSTGWNETIVENLLANVYHQINHLKTVLEEKLEKEDFTRGKLMSSLHLKRYYGRILHYLQAKEYSHCAWTIVRVEILRNFYFINRLTGYLRN

SEQ ID NO: 1003 - protein, 166 aa, Homo sapiens
MSYNLLGFLQRSSNFQCQKLLWQLNGRLEYCLKDRMNFDIPEEIKQLQQFQKEDAALTIYEMLQNIFAIFRQDSSSTGWNETIVENLLANVYHQINHLKTVLEEKLEKEDFTRGKLMSSLHLKRYYGRILHYLTAKEYSHCAWTIVRVEILRNFYFINRLTGYLRN

SEQ ID NO: 1004 - protein, 166 aa, Homo sapiens
MSYNLLGFLQRSSNFQCQKLLWQLNGRLEYCLKDRMNFDIPEEIKQLQQFQKEDAALTIYEMLQNIFAIFRQDSSSTGWNETIVENLLANVYHQINHLKTVLEEKLEKEDFTRGKLMSSLHLKRYYGRILHYLSAKEYSHCAWTIVRVEILRNFYFINRLTGYLRN

SEQ ID NO: 1005 - protein, 166 aa, Homo sapiens
MSYNLLGFLQRSSNFQCQKLLWQLNGRLEYCLKDRMNFDIPEEIKQLQQFQKEDAALTIYEMLQNIFAIFRQDSSSTGWNETIVENLLANVYHQINHLKTVLEEKLEKEDFTRGKLMSSLHLKRYYGRILHYLHAKEYSHCAWTIVRVEILRNFYFINRLTGYLRN

SEQ ID NO: 1006 - protein, 166 aa, Homo sapiens
MSYNLLGFLQRSSNFQCQKLLWQLNGRLEYCLKDRMNFDIPEEIKQLQQFQKEDAALTIYEMLQNIFAIFRQDSSSTGWNETIVENLLANVYHQINHLKTVLEEKLEKEDFTRGKLMSSLHLKRYYGRILHYLKAQEYSHCAWTIVRVEILRNFYFINRLTGYLRN

SEQ ID NO: 1007 - protein, 166 aa, Homo sapiens
MSYNLLGFLQRSSNFQCQKLLWQLNGRLEYCLKDRMNFDIPEEIKQLQQFQKEDAALTIYEMLQNIFAIFRQDSSSTGWNETIVENLLANVYHQINHLKTVLEEKLEKEDFTRGKLMSSLHLKRYYGRILHYLKATEYSHCAWTIVRVEILRNFYFINRLTGYLRN

SEQ ID NO: 1008 - protein, 166 aa, Homo sapiens
MSYNLLGFLQRSSNFQCQKLLWQLNGRLEYCLKDRMNFDIPEEIKQLQQFQKEDAALTIYEMLQNIFAIFRQDSSSTGWNETIVENLLANVYHQINHLKTVLEEKLEKEDFTRGKLMSSLHLKRYYGRILHYLKASEYSHCAWTIVRVEILRNFYFINRLTGYLRN

SEQ ID NO: 1009 - protein, 166 aa, Homo sapiens
MSYNLLGFLQRSSNFQCQKLLWQLNGRLEYCLKDRMNFDIPEEIKQLQQFQKEDAALTIYEMLQNIFAIFRQDSSSTGWNETIVENLLANVYHQINHLKTVLEEKLEKEDFTRGKLMSSLHLKRYYGRILHYLKAHEYSHCAWTIVRVEILRNFYFINRLTGYLRN

SEQ ID NO: 1010 - protein, 166 aa, Homo sapiens
MSYNLLGFLQRSSNFQCQKLLWQLNGRLEYCLKDRMNFDIPEEIKQLQQFQKEDAALTIYEMLQNIFAIFRQDSSSTGWNETIVENLLANVYHQINHLKTVLEEKLEKEDFTRGKLMSSLHLKRYYGRILHYLKAKQYSHCAWTIVRVEILRNFYFINRLTGYLRN

SEQ ID NO: 1011 - protein, 166 aa, Homo sapiens
MSYNLLGFLQRSSNFQCQKLLWQLNGRLEYCLKDRMNFDIPEEIKQLQQFQKEDAALTIYEMLQNIFAIFRQDSSSTGWNETIVENLLANVYHQINHLKTVLEEKLEKEDFTRGKLMSSLHLKRYYGRILHYLKAKHYSHCAWTIVRVEILRNFYFINRLTGYLRN

SEQ ID NO: 1012 - protein, 166 aa, Homo sapiens
MSYNLLGFLQRSSNFQCQKLLWQLNGRLEYCLKDRMNFDIPEEIKQLQQFQKEDAALTIYEMLQNIFAIFRQDSSSTGWNETIVENLLANVYHQINHLKTVLEEKLEKEDFTRGKLMSSLHLKRYYGRILHYLKAKEYSHCAWTIVRVEILRNFYFINRLTGHLRN

SEQ ID NO: 1013 - protein, 166 aa, Homo sapiens
MSYNLLGFLQRSSNFQCQKLLWQLNGRLEYCLKDRMNFDIPEEIKQLQQFQKEDAALTIYEMLQNIFAIFRQDSSSTGWNETIVENLLANVYHQINHLKTVLEEKLEKEDFTRGKLMSSLHLKRYYGRILHYLKAKEYSHCAWTIVRVEILRNFYFINRLTGILRN

SEQ ID NO: 1014 - protein, 166 aa, Homo sapiens
MSYNLLGFLQRSSNFQCQKLLWQLNGRLEYCLKDRMNFDIPEEIKQLQQFQKEDAALTIYEMLQNIFAIFRQDSSSTGWNETIVENLLANVYHQINHLKTVLEEKLEKEDFTRGKLMSSLHLKRYYGRILHYLKAKEYSHCAWTIVRVEILRNFYFINRLTGYLHN

SEQ ID NO: 1015 - protein, 166 aa, Homo sapiens
MSYNLLGFLQRSSNFQCQKLLWQLNGRLEYCLKDRMNFDIPEEIKQLQQFQKEDAALTIYEMLQNIFAIFRQDSSSTGWNETIVENLLANVYHQINHLKTVLEEKLEKEDFTRGKLMSSLHLKRYYGRILHYLKAKEYSHCAWTIVRVEILRNFYFINRLTGYLQN

SEQ ID NO: 1016 - protein, 166 aa, Homo sapiens
VSYNLLGFLQRSSNFQCQKLLWQLNGRLEYCLKDRMNFDIPEEIKQLQQFQKEDAALTIYEMLQNIFAIFRQDSSSTGWNETIVENLLANVYHQINHLKTVLEEKLEKEDFTRGKLMSSLHLKRYYGRILHYLKAKEYSHCAWTIVRVEILRNFYFINRLTGYLRN

SEQ ID NO: 1017 - protein, 166 aa, Homo sapiens
ISYNLLGFLQRSSNFQCQKLLWQLNGRLEYCLKDRMNFDIPEEIKQLQQFQKEDAALTIYEMLQNIFAIFRQDSSSTGWNETIVENLLANVYHQINHLKTVLEEKLEKEDFTRGKLMSSLHLKRYYGRILHYLKAKEYSHCAWTIVRVEILRNFYFINRLTGYLRN

SEQ ID NO: 1018 - protein, 166 aa, Homo sapiens
TSYNLLGFLQRSSNFQCQKLLWQLNGRLEYCLKDRMNFDIPEEIKQLQQFQKEDAALTIYEMLQNIFAIFRQDSSSTGWNETIVENLLANVYHQINHLKTVLEEKLEKEDFTRGKLMSSLHLKRYYGRILHYLKAKEYSHCAWTIVRVEILRNFYFINRLTGYLRN

SEQ ID NO: 1019 - protein, 166 aa, Homo sapiens
ASYNLLGFLQRSSNFQCQKLLWQLNGRLEYCLKDRMNFDIPEEIKQLQQFQKEDAALTIYEMLQNIFAIFRQDSSSTGWNETIVENLLANVYHQINHLKTVLEEKLEKEDFTRGKLMSSLHLKRYYGRILHYLKAKEYSHCAWTIVRVEILRNFYFINRLTGYLRN

SEQ ID NO: 1020 - protein, 166 aa, Homo sapiens
MSYNVLGFLQRSSNFQCQKLLWQLNGRLEYCLKDRMNFDIPEEIKQLQQFQKEDAALTIYEMLQNIFAIFRQDSSSTGWNETIVENLLANVYHQINHLKTVLEEKLEKEDFTRGKLMSSLHLKRYYGRILHYLKAKEYSHCAWTIVRVEILRNFYFINRLTGYLRN

SEQ ID NO: 1021 - protein, 166 aa, Homo sapiens
MSYNILGFLQRSSNFQCQKLLWQLNGRLEYCLKDRMNFDIPEEIKQLQQFQKEDAALTIYEMLQNIFAIFRQDSSSTGWNETIVENLLANVYHQINHLKTVLEEKLEKEDFTRGKLMSSLHLKRYYGRILHYLKAKEYSHCAWTIVRVEILRNFYFINRLTGYLRN

SEQ ID NO: 1022 - protein, 166 aa, Homo sapiens
MSYNTLGFLQRSSNFQCQKLLWQLNGRLEYCLKDRMNFDIPEEIKQLQQFQKEDAALTIYEMLQNIFAIFRQDSSSTGWNETIVENLLANVYHQINHLKTVLEEKLEKEDFTRGKLMSSLHLKRYYGRILHYLKAKEYSHCAWTIVRVEILRNFYFINRLTGYLRN

SEQ ID NO: 1023 - protein, 166 aa, Homo sapiens
MSYNQLGFLQRSSNFQCQKLLWQLNGRLEYCLKDRMNFDIPEEIKQLQQFQKEDAALTIYEMLQNIFAIFRQDSSSTGWNETIVENLLANVYHQINHLKTVLEEKLEKEDFTRGKLMSSLHLKRYYGRILHYLKAKEYSHCAWTIVRVEILRNFYFINRLTGYLRN

SEQ ID NO: 1024 - protein, 166 aa, Homo sapiens
MSYNHLGFLQRSSNFQCQKLLWQLNGRLEYCLKDRMNFDIPEEIKQLQQFQKEDAALTIYEMLQNIFAIFRQDSSSTGWNETIVENLLANVYHQINHLKTVLEEKLEKEDFTRGKLMSSLHLKRYYGRILHYLKAKEYSHCAWTIVRVEILRNFYFINRLTGYLRN

SEQ ID NO: 1025 - protein, 166 aa, Homo sapiens
MSYNALGFLQRSSNFQCQKLLWQLNGRLEYCLKDRMNFDIPEEIKQLQQFQKEDAALTIYEMLQNIFAIFRQDSSSTGWNETIVENLLANVYHQINHLKTVLEEKLEKEDFTRGKLMSSLHLKRYYGRILHYLKAKEYSHCAWTIVRVEILRNFYFINRLTGYLRN

SEQ ID NO: 1026 - protein, 166 aa, Homo sapiens
MSYNLLGILQRSSNFQCQKLLWQLNGRLEYCLKDRMNFDIPEEIKQLQQFQKEDAALTIYEMLQNIFAIFRQDSSSTGWNETIVENLLANVYHQINHLKTVLEEKLEKEDFTRGKLMSSLHLKRYYGRILHYLKAKEYSHCAWTIVRVEILRNFYFINRLTGYLRN

SEQ ID NO: 1027 - protein, 166 aa, Homo sapiens
MSYNLLGVLQRSSNFQCQKLLWQLNGRLEYCLKDRMNFDIPEEIKQLQQFQKEDAALTIYEMLQNIFAIFRQDSSSTGWNETIVENLLANVYHQINHLKTVLEEKLEKEDFTRGKLMSSLHLKRYYGRILHYLKAKEYSHCAWTIVRVEILRNFYFINRLTGYLRN

SEQ ID NO: 1028 - protein, 166 aa, Homo sapiens
MSYNLLGFVQRSSNFQCQKLLWQLNGRLEYCLKDRMNFDIPEEIKQLQQFQKEDAALTIYEMLQNIFAIFRQDSSSTGWNETIVENLLANVYHQINHLKTVLEEKLEKEDFTRGKLMSSLHLKRYYGRILHYLKAKEYSHCAWTIVRVEILRNFYFINRLTGYLRN

SEQ ID NO: 1029 - protein, 166 aa, Homo sapiens
MSYNLLGFIQRSSNFQCQKLLWQLNGRLEYCLKDRMNFDIPEEIKQLQQFQKEDAALTIYEMLQNIFAIFRQDSSSTGWNETIVENLLANVYHQINHLKTVLEEKLEKEDFTRGKLMSSLHLKRYYGRILHYLKAKEYSHCAWTIVRVEILRNFYFINRLTGYLRN

SEQ ID NO: 1030 - protein, 166 aa, Homo sapiens
MSYNLLGFTQRSSNFQCQKLLWQLNGRLEYCLKDRMNFDIPEEIKQLQQFQKEDAALTIYEMLQNIFAIFRQDSSSTGWNETIVENLLANVYHQINHLKTVLEEKLEKEDFTRGKLMSSLHLKRYYGRILHYLKAKEYSHCAWTIVRVEILRNFYFINRLTGYLRN

SEQ ID NO: 1031 - protein, 166 aa, Homo sapiens
MSYNLLGFQQRSSNFQCQKLLWQLNGRLEYCLKDRMNFDIPEEIKQLQQFQKEDAALTIYEMLQNIFAIFRQDSSSTGWNETIVENLLANVYHQINHLKTVLEEKLEKEDFTRGKLMSSLHLKRYYGRILHYLKAKEYSHCAWTIVRVEILRNFYFINRLTGYLRN

SEQ ID NO: 1032 - protein, 166 aa, Homo sapiens
MSYNLLGFHQRSSNFQCQKLLWQLNGRLEYCLKDRMNFDIPEEIKQLQQFQKEDAALTIYEMLQNIFAIFRQDSSSTGWNETIVENLLANVYHQINHLKTVLEEKLEKEDFTRGKLMSSLHLKRYYGRILHYLKAKEYSHCAWTIVRVEILRNFYFINRLTGYLRN

SEQ ID NO: 1033 - protein, 166 aa, Homo sapiens
MSYNLLGFAQRSSNFQCQKLLWQLNGRLEYCLKDRMNFDIPEEIKQLQQFQKEDAALTIYEMLQNIFAIFRQDSSSTGWNETIVENLLANVYHQINHLKTVLEEKLEKEDFTRGKLMSSLHLKRYYGRILHYLKAKEYSHCAWTIVRVEILRNFYFINRLTGYLRN

SEQ ID NO: 1034 - protein, 166 aa, Homo sapiens
MSYNLLGFLQHSSNFQCQKLLWQLNGRLEYCLKDRMNFDIPEEIKQLQQFQKEDAALTIYEMLQNIFAIFRQDSSSTGWNETIVENLLANVYHQINHLKTVLEEKLEKEDFTRGKLMSSLHLKRYYGRILHYLKAKEYSHCAWTIVRVEILRNFYFINRLTGYLRN

SEQ ID NO: 1035 - protein, 166 aa, Homo sapiens
MSYNLLGFLQQSSNFQCQKLLWQLNGRLEYCLKDRMNFDIPEEIKQLQQFQKEDAALTIYEMLQNIFAIFRQDSSSTGWNETIVENLLANVYHQINHLKTVLEEKLEKEDFTRGKLMSSLHLKRYYGRILHYLKAKEYSHCAWTIVRVEILRNFYFINRLTGYLRN

SEQ ID NO: 1036 - protein, 166 aa, Homo sapiens
MSYNLLGFLQRSSNIQCQKLLWQLNGRLEYCLKDRMNFDIPEEIKQLQQFQKEDAALTIYEMLQNIFAIFRQDSSSTGWNETIVENLLANVYHQINHLKTVLEEKLEKEDFTRGKLMSSLHLKRYYGRILHYLKAKEYSHCAWTIVRVEILRNFYFINRLTGYLRN

SEQ ID NO: 1037 - protein, 166 aa, Homo sapiens
MSYNLLGFLQRSSNVQCQKLLWQLNGRLEYCLKDRMNFDIPEEIKQLQQFQKEDAALTIYEMLQNIFAIFRQDSSSTGWNETIVENLLANVYHQINHLKTVLEEKLEKEDFTRGKLMSSLHLKRYYGRILHYLKAKEYSHCAWTIVRVEILRNFYFINRLTGYLRN

SEQ ID NO: 1038 - protein, 166 aa, Homo sapiens
MSYNLLGFLQRSSNFQCQQLLWQLNGRLEYCLKDRMNFDIPEEIKQLQQFQKEDAALTIYEMLQNIFAIFRQDSSSTGWNETIVENLLANVYHQINHLKTVLEEKLEKEDFTRGKLMSSLHLKRYYGRILHYLKAKEYSHCAWTIVRVEILRNFYFINRLTGYLRN

SEQ ID NO: 1039 - protein, 166 aa, Homo sapiens
MSYNLLGFLQRSSNFQCQTLLWQLNGRLEYCLKDRMNFDIPEEIKQLQQFQKEDAALTIYEMLQNIFAIFRQDSSSTGWNETIVENLLANVYHQINHLKTVLEEKLEKEDFTRGKLMSSLHLKRYYGRILHYLKAKEYSHCAWTIVRVEILRNFYFINRLTGYLRN

SEQ ID NO: 1040 - protein, 166 aa, Homo sapiens
MSYNLLGFLQRSSNFQCQSLLWQLNGRLEYCLKDRMNFDIPEEIKQLQQFQKEDAALTIYEMLQNIFAIFRQDSSSTGWNETIVENLLANVYHQINHLKTVLEEKLEKEDFTRGKLMSSLHLKRYYGRILHYLKAKEYSHCAWTIVRVEILRNFYFINRLTGYLRN

SEQ ID NO: 1041 - protein, 166 aa, Homo sapiens
MSYNLLGFLQRSSNFQCQHLLWQLNGRLEYCLKDRMNFDIPEEIKQLQQFQKEDAALTIYEMLQNIFAIFRQDSSSTGWNETIVENLLANVYHQINHLKTVLEEKLEKEDFTRGKLMSSLHLKRYYGRILHYLKAKEYSHCAWTIVRVEILRNFYFINRLTGYLRN

SEQ ID NO: 1042 - protein, 166 aa, Homo sapiens
MSYNLLGFLQRSSNFQCQKLLSQLNGRLEYCLKDRMNFDIPEEIKQLQQFQKEDAALTIYEMLQNIFAIFRQDSSSTGWNETIVENLLANVYHQINHLKTVLEEKLEKEDFTRGKLMSSLHLKRYYGRILHYLKAKEYSHCAWTIVRVEILRNFYFINRLTGYLRN

SEQ ID NO: 1043 - protein, 165 aa, Homo sapiens
MSYNLLGFLQRSSNFQCQKLLHQLNGRLEYCLKDRMNFDIPEEIKQLQQFQKEDAALTIYEMLQNIFAIFRQDSSSTGWNETIVENLLANVYHQINHLKTVLEEKLEKEDFTRGKLMSSLHLKRYYGRILHYLKAKEYSHCAWTIVRVEILRNFYFINRLTGYLR

SEQ ID NO: 1044 - protein, 166 aa, Homo sapiens
MSYNLLGFLQRSSNFQCQKLLWQLHGRLEYCLKDRMNFDIPEEIKQLQQFQKEDAALTIYEMLQNIFAIFRQDSSSTGWNETIVENLLANVYHQINHLKTVLEEKLEKEDFTRGKLMSSLHLKRYYGRILHYLKAKEYSHCAWTIVRVEILRNFYFINRLTGYLRN

SEQ ID NO: 1045 - protein, 166 aa, Homo sapiens
MSYNLLGFLQRSSNFQCQKLLWQLSGRLEYCLKDRMNFDIPEEIKQLQQFQKEDAALTIYEMLQNIFAIFRQDSSSTGWNETIVENLLANVYHQINHLKTVLEEKLEKEDFTRGKLMSSLHLKRYYGRILHYLKAKEYSHCAWTIVRVEILRNFYFINRLTGYLRN

SEQ ID NO: 1046 - protein, 166 aa, Homo sapiens
MSYNLLGFLQRSSNFQCQKLLWQLQGRLEYCLKDRMNFDIPEEIKQLQQFQKEDAALTIYEMLQNIFAIFRQDSSSTGWNETIVENLLANVYHQINHLKTVLEEKLEKEDFTRGKLMSSLHLKRYYGRILHYLKAKEYSHCAWTIVRVEILRNFYFINRLTGYLRN

SEQ ID NO: 1047 - protein, 166 aa, Homo sapiens
MSYNLLGFLQRSSNFQCQKLLWQLNGHLEYCLKDRMNFDIPEEIKQLQQFQKEDAALTIYEMLQNIFAIFRQDSSSTGWNETIVENLLANVYHQINHLKTVLEEKLEKEDFTRGKLMSSLHLKRYYGRILHYLKAKEYSHCAWTIVRVEILRNFYFINRLTGYLRN

SEQ ID NO: 1048 - protein, 166 aa, Homo sapiens
MSYNLLGFLQRSSNFQCQKLLWQLNGQLEYCLKDRMNFDIPEEIKQLQQFQKEDAALTIYEMLQNIFAIFRQDSSSTGWNETIVENLLANVYHQINHLKTVLEEKLEKEDFTRGKLMSSLHLKRYYGRILHYLKAKEYSHCAWTIVRVEILRNFYFINRLTGYLRN

SEQ ID NO: 1049 - protein, 166 aa, Homo sapiens
MSYNLLGFLQRSSNFQCQKLLWQLNGRVEYCLKDRMNFDIPEEIKQLQQFQKEDAALTIYEMLQNIFAIFRQDSSSTGWNETIVENLLANVYHQINHLKTVLEEKLEKEDFTRGKLMSSLHLKRYYGRILHYLKAKEYSHCAWTIVRVEILRNFYFINRLTGYLRN

SEQ ID NO: 1050 - protein, 166 aa, Homo sapiens
MSYNLLGFLQRSSNFQCQKLLWQLNGRIEYCLKDRMNFDIPEEIKQLQQFQKEDAALTIYEMLQNIFAIFRQDSSSTGWNETIVENLLANVYHQINHLKTVLEEKLEKEDFTRGKLMSSLHLKRYYGRILHYLKAKEYSHCAWTIVRVEILRNFYFINRLTGYLRN

SEQ ID NO: 1051 - protein, 166 aa, Homo sapiens
MSYNLLGFLQRSSNFQCQKLLWQLNGRTEYCLKDRMNFDIPEEIKQLQQFQKEDAALTIYEMLQNIFAIFRQDSSSTGWNETIVENLLANVYHQINHLKTVLEEKLEKEDFTRGKLMSSLHLKRYYGRILHYLKAKEYSHCAWTIVRVEILRNFYFINRLTGYLRN

SEQ ID NO: 1052 - protein, 166 aa, Homo sapiens
MSYNLLGFLQRSSNFQCQKLLWQLNGRQEYCLKDRMNFDIPEEIKQLQQFQKEDAALTIYEMLQNIFAIFRQDSSSTGWNETIVENLLANVYHQINHLKTVLEEKLEKEDFTRGKLMSSLHLKRYYGRILHYLKAKEYSHCAWTIVRVEILRNFYFINRLTGYLRN

SEQ ID NO: 1053 - protein, 166 aa, Homo sapiens
MSYNLLGFLQRSSNFQCQKLLWQLNGRHEYCLKDRMNFDIPEEIKQLQQFQKEDAALTIYEMLQNIFAIFRQDSSSTGWNETIVENLLANVYHQINHLKTVLEEKLEKEDFTRGKLMSSLHLKRYYGRILHYLKAKEYSHCAWTIVRVEILRNFYFINRLTGYLRN

SEQ ID NO: 1054 - protein, 166 aa, Homo sapiens
MSYNLLGFLQRSSNFQCQKLLWQLNGRAEYCLKDRMNFDIPEEIKQLQQFQKEDAALTIYEMLQNIFAIFRQDSSSTGWNETIVENLLANVYHQINHLKTVLEEKLEKEDFTRGKLMSSLHLKRYYGRILHYLKAKEYSHCAWTIVRVEILRNFYFINRLTGYLRN

SEQ ID NO: 1055 - protein, 166 aa, Homo sapiens
MSYNLLGFLQRSSNFQCQKLLWQLNGRLQYCLKDRMNFDIPEEIKQLQQFQKEDAALTIYEMLQNIFAIFRQDSSSTGWNETIVENLLANVYHQINHLKTVLEEKLEKEDFTRGKLMSSLHLKRYYGRILHYLKAKEYSHCAWTIVRVEILRNFYFINRLTGYLRN

SEQ ID NO: 1056 - protein, 166 aa, Homo sapiens
MSYNLLGFLQRSSNFQCQKLLWQLNGRLHYCLKDRMNFDIPEEIKQLQQFQKEDAALTIYEMLQNIFAIFRQDSSSTGWNETIVENLLANVYHQINHLKTVLEEKLEKEDFTRGKLMSSLHLKRYYGRILHYLKAKEYSHCAWTIVRVEILRNFYFINRLTGYLRN

SEQ ID NO: 1057 - protein, 166 aa, Homo sapiens
MSYNLLGFLQRSSNFQCQKLLWQLNGRLEHCLKDRMNFDIPEEIKQLQQFQKEDAALTIYEMLQNIFAIFRQDSSSTGWNETIVENLLANVYHQINHLKTVLEEKLEKEDFTRGKLMSSLHLKRYYGRILHYLKAKEYSHCAWTIVRVEILRNFYFINRLTGYLRN

SEQ ID NO: 1058 - protein, 166 aa, Homo sapiens
MSYNLLGFLQRSSNFQCQKLLWQLNGRLEICLKDRMNFDIPEEIKQLQQFQKEDAALTIYEMLQNIFAIFRQDSSSTGWNETIVENLLANVYHQINHLKTVLEEKLEKEDFTRGKLMSSLHLKRYYGRILHYLKAKEYSHCAWTIVRVEILRNFYFINRLTGYLRN

SEQ ID NO: 1059 - protein, 166 aa, Homo sapiens
MSYNLLGFLQRSSNFQCQKLLWQLNGRLEYCVKDRMNFDIPEEIKQLQQFQKEDAALTIYEMLQNIFAIFRQDSSSTGWNETIVENLLANVYHQINHLKTVLEEKLEKEDFTRGKLMSSLHLKRYYGRILHYLKAKEYSHCAWTIVRVEILRNFYFINRLTGYLRN

SEQ ID NO: 1060 - protein, 166 aa, Homo sapiens
MSYNLLGFLQRSSNFQCQKLLWQLNGRLEYCIKDRMNFDIPEEIKQLQQFQKEDAALTIYEMLQNIFAIFRQDSSSTGWNETIVENLLANVYHQINHLKTVLEEKLEKEDFTRGKLMSSLHLKRYYGRILHYLKAKEYSHCAWTIVRVEILRNFYFINRLTGYLRN

SEQ ID NO: 1061 - protein, 166 aa, Homo sapiens
MSYNLLGFLQRSSNFQCQKLLWQLNGRLEYCTKDRMNFDIPEEIKQLQQFQKEDAALTIYEMLQNIFAIFRQDSSSTGWNETIVENLLANVYHQINHLKTVLEEKLEKEDFTRGKLMSSLHLKRYYGRILHYLKAKEYSHCAWTIVRVEILRNFYFINRLTGYLRN

SEQ ID NO: 1062 - protein, 166 aa, Homo sapiens
MSYNLLGFLQRSSNFQCQKLLWQLNGRLEYCQKDRMNFDIPEEIKQLQQFQKEDAALTIYEMLQNIFAIFRQDSSSTGWNETIVENLLANVYHQINHLKTVLEEKLEKEDFTRGKLMSSLHLKRYYGRILHYLKAKEYSHCAWTIVRVEILRNFYFINRLTGYLRN

SEQ ID NO: 1063 - protein, 166 aa, Homo sapiens
MSYNLLGFLQRSSNFQCQKLLWQLNGRLEYCHKDRMNFDIPEEIKQLQQFQKEDAALTIYEMLQNIFAIFRQDSSSTGWNETIVENLLANVYHQINHLKTVLEEKLEKEDFTRGKLMSSLHLKRYYGRILHYLKAKEYSHCAWTIVRVEILRNFYFINRLTGYLRN

SEQ ID NO: 1064 - protein, 166 aa, Homo sapiens
MSYNLLGFLQRSSNFQCQKLLWQLNGRLEYCAKDRMNFDIPEEIKQLQQFQKEDAALTIYEMLQNIFAIFRQDSSSTGWNETIVENLLANVYHQINHLKTVLEEKLEKEDFTRGKLMSSLHLKRYYGRILHYLKAKEYSHCAWTIVRVEILRNFYFINRLTGYLRN

SEQ ID NO: 1065 - protein, 166 aa, Homo sapiens
QSYNLLGFLQRSSNFQCQKLLWQLNGRLEYCLKDRMNFDIPEEIKQLQQFQKEDAALTIYEMLQNIFAIFRQDSSSTGWNETIVENLLANVYHQINHLKTVLEEKLEKEDFTRGKLMSSLHLKRYYGRILHYLKAKEYSHCAWTIVRVEILRNFYFINRLTGYLRN

SEQ ID NO: 1066 - protein, 166 aa, Homo sapiens
MSYNLLGFLQRSSNFQCQKLLWQLNGRLEYCLQDRMNFDIPEEIKQLQQFQKEDAALTIYEMLQNIFAIFRQDSSSTGWNETIVENLLANVYHQINHLKTVLEEKLEKEDFTRGKLMSSLHLKRYYGRILHYLKAKEYSHCAWTIVRVEILRNFYFINRLTGYLRN

SEQ ID NO: 1067 - protein, 166 aa, Homo sapiens
MSYNLLGFLQRSSNFQCQKLLWQLNGRLEYCLTDRMNFDIPEEIKQLQQFQKEDAALTIYEMLQNIFAIFRQDSSSTGWNETIVENLLANVYHQINHLKTVLEEKLEKEDFTRGKLMSSLHLKRYYGRILHYLKAKEYSHCAWTIVRVEILRNFYFINRLTGYLRN

SEQ ID NO: 1068 - protein, 166 aa, Homo sapiens
MSYNLLGFLQRSSNFQCQKLLWQLNGRLEYCLSDRMNFDIPEEIKQLQQFQKEDAALTIYEMLQNIFAIFRQDSSSTGWNETIVENLLANVYHQINHLKTVLEEKLEKEDFTRGKLMSSLHLKRYYGRILHYLKAKEYSHCAWTIVRVEILRNFYFINRLTGYLRN

SEQ ID NO: 1069 - protein, 166 aa, Homo sapiens
MSYNLLGFLQRSSNFQCQKLLWQLNGRLEYCLHDRMNFDIPEEIKQLQQFQKEDAALTIYEMLQNIFAIFRQDSSSTGWNETIVENLLANVYHQINHLKTVLEEKLEKEDFTRGKLMSSLHLKRYYGRILHYLKAKEYSHCAWTIVRVEILRNFYFINRLTGYLRN

SEQ ID NO: 1070 - protein, 166 aa, Homo sapiens
MSYNLLGFLQRSSNFQCQKLLWQLNGRLEYCLKDHMNFDIPEEIKQLQQFQKEDAALTIYEMLQNIFAIFRQDSSSTGWNETIVENLLANVYHQINHLKTVLEEKLEKEDFTRGKLMSSLHLKRYYGRILHYLKAKEYSHCAWTIVRVEILRNFYFINRLTGYLRN

SEQ ID NO: 1071 - protein, 166 aa, Homo sapiens
MSYNLLGFLQRSSNFQCQKLLWQLNGRLEYCLKDQMNFDIPEEIKQLQQFQKEDAALTIYEMLQNIFAIFRQDSSSTGWNETIVENLLANVYHQINHLKTVLEEKLEKEDFTRGKLMSSLHLKRYYGRILHYLKAKEYSHCAWTIVRVEILRNFYFINRLTGYLRN

SEQ ID NO: 1072 - protein, 166 aa, Homo sapiens
MSYNLLGFLQRSSNFQCQKLLWQLNGRLEYCLKDRVNFDIPEEIKQLQQFQKEDAALTIYEMLQNIFAIFRQDSSSTGWNETIVENLLANVYHQINHLKTVLEEKLEKEDFTRGKLMSSLHLKRYYGRILHYLKAKEYSHCAWTIVRVEILRNFYFINRLTGYLRN

SEQ ID NO: 1073 - protein, 166 aa, Homo sapiens
MSYNLLGFLQRSSNFQCQKLLWQLNGRLEYCLKDRINFDIPEEIKQLQQFQKEDAALTIYEMLQNIFAIFRQDSSSTGWNETIVENLLANVYHQINHLKTVLEEKLEKEDFTRGKLMSSLHLKRYYGRILHYLKAKEYSHCAWTIVRVEILRNFYFINRLTGYLRN

SEQ ID NO: 1074 - protein, 166 aa, Homo sapiens
MSYNLLGFLQRSSNFQCQKLLWQLNGRLEYCLKDRTNFDIPEEIKQLQQFQKEDAALTIYEMLQNIFAIFRQDSSSTGWNETIVENLLANVYHQINHLKTVLEEKLEKEDFTRGKLMSSLHLKRYYGRILHYLKAKEYSHCAWTIVRVEILRNFYFINRLTGYLRN

SEQ ID NO: 1075 - protein, 166 aa, Homo sapiens
MSYNLLGFLQRSSNFQCQKLLWQLNGRLEYCLKDRQNFDIPEEIKQLQQFQKEDAALTIYEMLQNIFAIFRQDSSSTGWNETIVENLLANVYHQINHLKTVLEEKLEKEDFTRGKLMSSLHLKRYYGRILHYLKAKEYSHCAWTIVRVEILRNFYFINRLTGYLRN

SEQ ID NO: 1076 - protein, 166 aa, Homo sapiens
MSYNLLGFLQRSSNFQCQKLLWQLNGRLEYCLKDRANFDIPEEIKQLQQFQKEDAALTIYEMLQNIFAIFRQDSSSTGWNETIVENLLANVYHQINHLKTVLEEKLEKEDFTRGKLMSSLHLKRYYGRILHYLKAKEYSHCAWTIVRVEILRNFYFINRLTGYLRN

SEQ ID NO: 1077 - protein, 166 aa, Homo sapiens
MSYNLLGFLQRSSNFQCQKLLWQLNGRLEYCLKDRMNFDIPEEIKQLQQFQKEDAALTIYEMLQNIFAIFRQDSSSTGWNETIVQNLLANVYHQINHLKTVLEEKLEKEDFTRGKLMSSLHLKRYYGRILHYLKAKEYSHCAWTIVRVEILRNFYFINRLTGYLRN

SEQ ID NO: 1078 - protein, 166 aa, Homo sapiens
MSYNLLGFLQRSSNFQCQKLLWQLNGRLEYCLKDRMNFDIPEEIKQLQQFQKEDAALTIYEMLQNIFAIFRQDSSSTGWNETIVHNLLANVYHQINHLKTVLEEKLEKEDFTRGKLMSSLHLKRYYGRILHYLKAKEYSHCAWTIVRVEILRNFYFINRLTGYLRN

SEQ ID NO: 1079 - protein, 166 aa, Homo sapiens
MSYNLLGFLQRSSNFQCQKLLWQLNGRLEYCLKDRMNFDIPEEIKQLQQFQKEDAALTIYEMLQNIFAIFRQDSSSTGWNETIVENLLANVHHQINHLKTVLEEKLEKEDFTRGKLMSSLHLKRYYGRILHYLKAKEYSHCAWTIVRVEILRNFYFINRLTGYLRN

SEQ ID NO: 1080 - protein, 166 aa, Homo sapiens
MSYNLLGFLQRSSNFQCQKLLWQLNGRLEYCLKDRMNFDIPEEIKQLQQFQKEDAALTIYEMLQNIFAIFRQDSSSTGWNETIVENLLANVIHQINHLKTVLEEKLEKEDFTRGKLMSSLHLKRYYGRILHYLKAKEYSHCAWTIVRVEILRNFYFINRLTGYLRN

SEQ ID NO: 1081 - protein, 166 aa, Homo sapiens
MSYNLLGFLQRSSNFQCQKLLWQLNGRLEYCLKDRMNFDIPEEIKQLQQFQKEDAALTIYEMLQNIFAIFRQDSSSTGWNETIVENLLANVYHQINHLQTVLEEKLEKEDFTRGKLMSSLHLKRYYGRILHYLKAKEYSHCAWTIVRVEILRNFYFINRLTGYLRN

SEQ ID NO: 1082 - protein, 166 aa, Homo sapiens
MSYNLLGFLQRSSNFQCQKLLWQLNGRLEYCLKDRMNFDIPEEIKQLQQFQKEDAALTIYEMLQNIFAIFRQDSSSTGWNETIVENLLANVYHQINHLTTVLEEKLEKEDFTRGKLMSSLHLKRYYGRILHYLKAKEYSHCAWTIVRVEILRNFYFINRLTGYLRN

SEQ ID NO: 1083 - protein, 166 aa, Homo sapiens
MSYNLLGFLQRSSNFQCQKLLWQLNGRLEYCLKDRMNFDIPEEIKQLQQFQKEDAALTIYEMLQNIFAIFRQDSSSTGWNETIVENLLANVYHQINHLSTVLEEKLEKEDFTRGKLMSSLHLKRYYGRILHYLKAKEYSHCAWTIVRVEILRNFYFINRLTGYLRN

SEQ ID NO: 1084 - protein, 166 aa, Homo sapiens
MSYNLLGFLQRSSNFQCQKLLWQLNGRLEYCLKDRMNFDIPEEIKQLQQFQKEDAALTIYEMLQNIFAIFRQDSSSTGWNETIVENLLANVYHQINHLHTVLEEKLEKEDFTRGKLMSSLHLKRYYGRILHYLKAKEYSHCAWTIVRVEILRNFYFINRLTGYLRN

SEQ ID NO: 1085 - protein, 166 aa, Homo sapiens
MSYNLLGFLQRSSNFQCQKLLWQLNGRLEYCLKDRMNFDIPEEIKQLQQFQKEDAALTIYEMLQNIFAIFRQDSSSTGWNETIVENLLANVYHQINHLKTVLQEKLEKEDFTRGKLMSSLHLKRYYGRILHYLKAKEYSHCAWTIVRVEILRNFYFINRLTGYLRN

SEQ ID NO: 1086 - protein, 166 aa, Homo sapiens
MSYNLLGFLQRSSNFQCQKLLWQLNGRLEYCLKDRMNFDIPEEIKQLQQFQKEDAALTIYEMLQNIFAIFRQDSSSTGWNETIVENLLANVYHQINHLKTVLHEKLEKEDFTRGKLMSSLHLKRYYGRILHYLKAKEYSHCAWTIVRVEILRNFYFINRLTGYLRN

SEQ ID NO: 1087 - protein, 166 aa, Homo sapiens
MSYNLLGFLQRSSNFQCQKLLWQLNGRLEYCLKDRMNFDIPEEIKQLQQFQKEDAALTIYEMLQNIFAIFRQDSSSTGWNETIVENLLANVYHQINHLKTVLEQKLEKEDFTRGKLMSSLHLKRYYGRILHYLKAKEYSHCAWTIVRVEILRNFYFINRLTGYLRN

SEQ ID NO: 1088 - protein, 166 aa, Homo sapiens
MSYNLLGFLQRSSNFQCQKLLWQLNGRLEYCLKDRMNFDIPEEIKQLQQFQKEDAALTIYEMLQNIFAIFRQDSSSTGWNETIVENLLANVYHQINHLKTVLEHKLEKEDFTRGKLMSSLHLKRYYGRILHYLKAKEYSHCAWTIVRVEILRNFYFINRLTGYLRN

SEQ ID NO: 1089 - protein, 166 aa, Homo sapiens
MSYNLLGFLQRSSNFQCQKLLWQLNGRLEYCLKDRMNFDIPEEIKQLQQFQKEDAALTIYEMLQNIFAIFRQDSSSTGWNETIVENLLANVYHQINHLKTVLEEQLEKEDFTRGKLMSSLHLKRYYGRILHYLKAKEYSHCAWTIVRVEILRNFYFINRLTGYLRN

SEQ ID NO: 1090 - protein, 166 aa, Homo sapiens
MSYNLLGFLQRSSNFQCQKLLWQLNGRLEYCLKDRMNFDIPEEIKQLQQFQKEDAALTIYEMLQNIFAIFRQDSSSTGWNETIVENLLANVYHQINHLKTVLEETLEKEDFTRGKLMSSLHLKRYYGRILHYLKAKEYSHCAWTIVRVEILRNFYFINRLTGYLRN

SEQ ID NO: 1091 - protein, 166 aa, Homo sapiens
MSYNLLGFLQRSSNFQCQKLLWQLNGRLEYCLKDRMNFDIPEEIKQLQQFQKEDAALTIYEMLQNIFAIFRQDSSSTGWNETIVENLLANVYHQINHLKTVLEESLEKEDFTRGKLMSSLHLKRYYGRILHYLKAKEYSHCAWTIVRVEILRNFYFINRLTGYLRN

SEQ ID NO: 1092 - protein, 166 aa, Homo sapiens
MSYNLLGFLQRSSNFQCQKLLWQLNGRLEYCLKDRMNFDIPEEIKQLQQFQKEDAALTIYEMLQNIFAIFRQDSSSTGWNETIVENLLANVYHQINHLKTVLEEHLEKEDFTRGKLMSSLHLKRYYGRILHYLKAKEYSHCAWTIVRVEILRNFYFINRLTGYLRN

SEQ ID NO: 1093 - protein, 166 aa, Homo sapiens
MSYNLLGFLQRSSNFQCQKLLWQLNGRLEYCLKDRMNFDIPEEIKQLQQFQKEDAALTIYEMLQNIFAIFRQDSSSTGWNETIVENLLANVYHQINHLKTVLEEKLEKEDFTRGKLMSSLHLKRYYGRILHYLKAKEHSHCAWTIVRVEILRNFYFINRLTGYLRN

SEQ ID NO: 1094 - protein, 166 aa, Homo sapiens
MSYNLLGFLQRSSNFQCQKLLWQLNGRLEYCLKDRMNFDIPEEIKQLQQFQKEDAALTIYEMLQNIFAIFRQDSSSTGWNETIVENLLANVYHQINHLKTVLEEKLEKEDFTRGKLMSSLHLKRYYGRILHYLKAKEISHCAWTIVRVEILRNFYFINRLTGYLRN

SEQ ID NO: 1095 - protein, 166 aa, Homo sapiens
MSYNLLGFLQRSSNFQCQKLLWQLNGRLEYCLKDRMNFDIPEEIKQLQQFQKEDAALTIYEMLQNIFAIFRQDSSSTGWNETIVENLLANVYHQINHLKTVLEEKLEKEDFTRGKLMSSLHLKRYYGRILHYLKAKEYSHCAWTIVRVEILHNFYFINRLTGYLRN

SEQ ID NO: 1096 - protein, 166 aa, Homo sapiens
MSYNLLGFLQRSSNFQCQKLLWQLNGRLEYCLKDRMNFDIPEEIKQLQQFQKEDAALTIYEMLQNIFAIFRQDSSSTGWNETIVENLLANVYHQINHLKTVLEEKLEKEDFTRGKLMSSLHLKRYYGRILHYLKAKEYSHCAWTIVRVEILQNFYFINRLTGYLRN

SEQ ID NO: 1097 - protein, 166 aa, Homo sapiens
MSYNLLGFLQRSSNFQCQKLLWQLNGRLEYCLKDRMNFDIPEEIKQLQQFQKEDAALTIYEMLQNIFAIFRQDSSSTGWNETIVENLLANVYHQINHLKTVLEEKLEKEDFTRGKLMSSLHLKRYYGRILHYLKAKEYSHCAWTIVRVEILRNFHFINRLTGYLRN

SEQ ID NO: 1098 - protein, 166 aa, Homo sapiens
MSYNLLGFLQRSSNFQCQKLLWQLNGRLEYCLKDRMNFDIPEEIKQLQQFQKEDAALTIYEMLQNIFAIFRQDSSSTGWNETIVENLLANVYHQINHLKTVLEEKLEKEDFTRGKLMSSLHLKRYYGRILHYLKAKEYSHCAWTIVRVEILRNFIFINRLTGYLRN

SEQ ID NO: 1099 - protein, 166 aa, Homo sapiens
MSYNLLGFLQRSSNFQCQKLLWQLNGRLEYCLKDRMNFDIPEEIKQLQQFQKEDAALTIYEMLQNIFAIFRQDSSSTGWNETIVENLLANVYHQINHLKTVLEEKLEKEDFTRGKLMSSLHLKRYYGRILHYLKAKEYSHCAWTIVRVEILRNFYFINHLTGYLRN

SEQ ID NO: 1100 - protein, 166 aa, Homo sapiens
MSYNLLGFLQRSSNFQCQKLLWQLNGRLEYCLKDRMNFDIPEEIKQLQQFQKEDAALTIYEMLQNIFAIFRQDSSSTGWNETIVENLLANVYHQINHLKTVLEEKLEKEDFTRGKLMSSLHLKRYYGRILHYLKAKEYSHCAWTIVRVEILRNFYFINQLTGYLRN

SEQ ID NO: 1101 - protein, 166 aa, Homo sapiens
DSYNLLGFLQRSSNFQCQKLLWQLNGRLEYCLKDRMNFDIPEEIKQLQQFQKEDAALTIYEMLQNIFAIFRQDSSSTGWNETIVENLLANVYHQINHLKTVLEEKLEKEDFTRGKLMSSLHLKRYYGRILHYLKAKEYSHCAWTIVRVEILRNFYFINRLTGYLRN

SEQ ID NO: 1102 - protein, 166 aa, Homo sapiens
ESYNLLGFLQRSSNFQCQKLLWQLNGRLEYCLKDRMNFDIPEEIKQLQQFQKEDAALTIYEMLQNIFAIFRQDSSSTGWNETIVENLLANVYHQINHLKTVLEEKLEKEDFTRGKLMSSLHLKRYYGRILHYLKAKEYSHCAWTIVRVEILRNFYFINRLTGYLRN

SEQ ID NO: 1103 - protein, 166 aa, Homo sapiens
KSYNLLGFLQRSSNFQCQKLLWQLNGRLEYCLKDRMNFDIPEEIKQLQQFQKEDAALTIYEMLQNIFAIFRQDSSSTGWNETIVENLLANVYHQINHLKTVLEEKLEKEDFTRGKLMSSLHLKRYYGRILHYLKAKEYSHCAWTIVRVEILRNFYFINRLTGYLRN

SEQ ID NO: 1104 - protein, 166 aa, Homo sapiens
NSYNLLGFLQRSSNFQCQKLLWQLNGRLEYCLKDRMNFDIPEEIKQLQQFQKEDAALTIYEMLQNIFAIFRQDSSSTGWNETIVENLLANVYHQINHLKTVLEEKLEKEDFTRGKLMSSLHLKRYYGRILHYLKAKEYSHCAWTIVRVEILRNFYFINRLTGYLRN

SEQ ID NO: 1105 - protein, 166 aa, Homo sapiens
RSYNLLGFLQRSSNFQCQKLLWQLNGRLEYCLKDRMNFDIPEEIKQLQQFQKEDAALTIYEMLQNIFAIFRQDSSSTGWNETIVENLLANVYHQINHLKTVLEEKLEKEDFTRGKLMSSLHLKRYYGRILHYLKAKEYSHCAWTIVRVEILRNFYFINRLTGYLRN

SEQ ID NO: 1106 - protein, 166 aa, Homo sapiens
SSYNLLGFLQRSSNFQCQKLLWQLNGRLEYCLKDRMNFDIPEEIKQLQQFQKEDAALTIYEMLQNIFAIFRQDSSSTGWNETIVENLLANVYHQINHLKTVLEEKLEKEDFTRGKLMSSLHLKRYYGRILHYLKAKEYSHCAWTIVRVEILRNFYFINRLTGYLRN

SEQ ID NO: 1107 - protein, 166 aa, Homo sapiens
MSYNDLGFLQRSSNFQCQKLLWQLNGRLEYCLKDRMNFDIPEEIKQLQQFQKEDAALTIYEMLQNIFAIFRQDSSSTGWNETIVENLLANVYHQINHLKTVLEEKLEKEDFTRGKLMSSLHLKRYYGRILHYLKAKEYSHCAWTIVRVEILRNFYFINRLTGYLRN

SEQ ID NO: 1108 - protein, 166 aa, Homo sapiens
MSYNELGFLQRSSNFQCQKLLWQLNGRLEYCLKDRMNFDIPEEIKQLQQFQKEDAALTIYEMLQNIFAIFRQDSSSTGWNETIVENLLANVYHQINHLKTVLEEKLEKEDFTRGKLMSSLHLKRYYGRILHYLKAKEYSHCAWTIVRVEILRNFYFINRLTGYLRN

SEQ ID NO: 1109 - protein, 166 aa, Homo sapiens
MSYNKLGFLQRSSNFQCQKLLWQLNGRLEYCLKDRMNFDIPEEIKQLQQFQKEDAALTIYEMLQNIFAIFRQDSSSTGWNETIVENLLANVYHQINHLKTVLEEKLEKEDFTRGKLMSSLHLKRYYGRILHYLKAKEYSHCAWTIVRVEILRNFYFINRLTGYLRN

SEQ ID NO: 1110 - protein, 166 aa, Homo sapiens
MSYNRLGFLQRSSNFQCQKLLWQLNGRLEYCLKDRMNFDIPEEIKQLQQFQKEDAALTIYEMLQNIFAIFRQDSSSTGWNETIVENLLANVYHQINHLKTVLEEKLEKEDFTRGKLMSSLHLKRYYGRILHYLKAKEYSHCAWTIVRVEILRNFYFINRLTGYLRN

SEQ ID NO: 1111 - protein, 166 aa, Homo sapiens
MSYNNLGFLQRSSNFQCQKLLWQLNGRLEYCLKDRMNFDIPEEIKQLQQFQKEDAALTIYEMLQNIFAIFRQDSSSTGWNETIVENLLANVYHQINHLKTVLEEKLEKEDFTRGKLMSSLHLKRYYGRILHYLKAKEYSHCAWTIVRVEILRNFYFINRLTGYLRN

SEQ ID NO: 1112 - protein, 166 aa, Homo sapiens
MSYNSLGFLQRSSNFQCQKLLWQLNGRLEYCLKDRMNFDIPEEIKQLQQFQKEDAALTIYEMLQNIFAIFRQDSSSTGWNETIVENLLANVYHQINHLKTVLEEKLEKEDFTRGKLMSSLHLKRYYGRILHYLKAKEYSHCAWTIVRVEILRNFYFINRLTGYLRN

SEQ ID NO: 1113 - protein, 166 aa, Homo sapiens
MSYNLDGFLQRSSNFQCQKLLWQLNGRLEYCLKDRMNFDIPEEIKQLQQFQKEDAALTIYEMLQNIFAIFRQDSSSTGWNETIVENLLANVYHQINHLKTVLEEKLEKEDFTRGKLMSSLHLKRYYGRILHYLKAKEYSHCAWTIVRVEILRNFYFINRLTGYLRN

SEQ ID NO: 1114 - protein, 166 aa, Homo sapiens
MSYNLEGFLQRSSNFQCQKLLWQLNGRLEYCLKDRMNFDIPEEIKQLQQFQKEDAALTIYEMLQNIFAIFRQDSSSTGWNETIVENLLANVYHQINHLKTVLEEKLEKEDFTRGKLMSSLHLKRYYGRILHYLKAKEYSHCAWTIVRVEILRNFYFINRLTGYLRN

SEQ ID NO: 1115 - protein, 166 aa, Homo sapiens
MSYNLKGFLQRSSNFQCQKLLWQLNGRLEYCLKDRMNFDIPEEIKQLQQFQKEDAALTIYEMLQNIFAIFRQDSSSTGWNETIVENLLANVYHQINHLKTVLEEKLEKEDFTRGKLMSSLHLKRYYGRILHYLKAKEYSHCAWTIVRVEILRNFYFINRLTGYLRN

SEQ ID NO: 1116 - protein, 166 aa, Homo sapiens
MSYNLNGFLQRSSNFQCQKLLWQLNGRLEYCLKDRMNFDIPEEIKQLQQFQKEDAALTIYEMLQNIFAIFRQDSSSTGWNETIVENLLANVYHQINHLKTVLEEKLEKEDFTRGKLMSSLHLKRYYGRILHYLKAKEYSHCAWTIVRVEILRNFYFINRLTGYLRN

SEQ ID NO: 1117 - protein, 166 aa, Homo sapiens
MSYNLQGFLQRSSNFQCQKLLWQLNGRLEYCLKDRMNFDIPEEIKQLQQFQKEDAALTIYEMLQNIFAIFRQDSSSTGWNETIVENLLANVYHQINHLKTVLEEKLEKEDFTRGKLMSSLHLKRYYGRILHYLKAKEYSHCAWTIVRVEILRNFYFINRLTGYLRN

SEQ ID NO: 1118 - protein, 166 aa, Homo sapiens
MSYNLRGFLQRSSNFQCQKLLWQLNGRLEYCLKDRMNFDIPEEIKQLQQFQKEDAALTIYEMLQNIFAIFRQDSSSTGWNETIVENLLANVYHQINHLKTVLEEKLEKEDFTRGKLMSSLHLKRYYGRILHYLKAKEYSHCAWTIVRVEILRNFYFINRLTGYLRN

SEQ ID NO: 1119 - protein, 166 aa, Homo sapiens
MSYNLSGFLQRSSNFQCQKLLWQLNGRLEYCLKDRMNFDIPEEIKQLQQFQKEDAALTIYEMLQNIFAIFRQDSSSTGWNETIVENLLANVYHQINHLKTVLEEKLEKEDFTRGKLMSSLHLKRYYGRILHYLKAKEYSHCAWTIVRVEILRNFYFINRLTGYLRN

SEQ ID NO: 1120 - protein, 166 aa, Homo sapiens
MSYNLTGFLQRSSNFQCQKLLWQLNGRLEYCLKDRMNFDIPEEIKQLQQFQKEDAALTIYEMLQNIFAIFRQDSSSTGWNETIVENLLANVYHQINHLKTVLEEKLEKEDFTRGKLMSSLHLKRYYGRILHYLKAKEYSHCAWTIVRVEILRNFYFINRLTGYLRN

SEQ ID NO: 1121 - protein, 166 aa, Homo sapiens
MSYNLLGDLQRSSNFQCQKLLWQLNGRLEYCLKDRMNFDIPEEIKQLQQFQKEDAALTIYEMLQNIFAIFRQDSSSTGWNETIVENLLANVYHQINHLKTVLEEKLEKEDFTRGKLMSSLHLKRYYGRILHYLKAKEYSHCAWTIVRVEILRNFYFINRLTGYLRN

SEQ ID NO: 1122 - protein, 166 aa, Homo sapiens
MSYNLLGELQRSSNFQCQKLLWQLNGRLEYCLKDRMNFDIPEEIKQLQQFQKEDAALTIYEMLQNIFAIFRQDSSSTGWNETIVENLLANVYHQINHLKTVLEEKLEKEDFTRGKLMSSLHLKRYYGRILHYLKAKEYSHCAWTIVRVEILRNFYFINRLTGYLRN

SEQ ID NO: 1123 - protein, 166 aa, Homo sapiens
MSYNLLGKLQRSSNFQCQKLLWQLNGRLEYCLKDRMNFDIPEEIKQLQQFQKEDAALTIYEMLQNIFAIFRQDSSSTGWNETIVENLLANVYHQINHLKTVLEEKLEKEDFTRGKLMSSLHLKRYYGRILHYLKAKEYSHCAWTIVRVEILRNFYFINRLTGYLRN

SEQ ID NO: 1124 - protein, 166 aa, Homo sapiens
MSYNLLGRLQRSSNFQCQKLLWQLNGRLEYCLKDRMNFDIPEEIKQLQQFQKEDAALTIYEMLQNIFAIFRQDSSSTGWNETIVENLLANVYHQINHLKTVLEEKLEKEDFTRGKLMSSLHLKRYYGRILHYLKAKEYSHCAWTIVRVEILRNFYFINRLTGYLRN

SEQ ID NO: 1125 - protein, 166 aa, Homo sapiens
MSYNLLGFDQRSSNFQCQKLLWQLNGRLEYCLKDRMNFDIPEEIKQLQQFQKEDAALTIYEMLQNIFAIFRQDSSSTGWNETIVENLLANVYHQINHLKTVLEEKLEKEDFTRGKLMSSLHLKRYYGRILHYLKAKEYSHCAWTIVRVEILRNFYFINRLTGYLRN

SEQ ID NO: 1126 - protein, 166 aa, Homo sapiens
MSYNLLGFEQRSSNFQCQKLLWQLNGRLEYCLKDRMNFDIPEEIKQLQQFQKEDAALTIYEMLQNIFAIFRQDSSSTGWNETIVENLLANVYHQINHLKTVLEEKLEKEDFTRGKLMSSLHLKRYYGRILHYLKAKEYSHCAWTIVRVEILRNFYFINRLTGYLRN

SEQ ID NO: 1127 - protein, 166 aa, Homo sapiens
MSYNLLGFKQRSSNFQCQKLLWQLNGRLEYCLKDRMNFDIPEEIKQLQQFQKEDAALTIYEMLQNIFAIFRQDSSSTGWNETIVENLLANVYHQINHLKTVLEEKLEKEDFTRGKLMSSLHLKRYYGRILHYLKAKEYSHCAWTIVRVEILRNFYFINRLTGYLRN

SEQ ID NO: 1128 - protein, 166 aa, Homo sapiens
MSYNLLGFNQRSSNFQCQKLLWQLNGRLEYCLKDRMNFDIPEEIKQLQQFQKEDAALTIYEMLQNIFAIFRQDSSSTGWNETIVENLLANVYHQINHLKTVLEEKLEKEDFTRGKLMSSLHLKRYYGRILHYLKAKEYSHCAWTIVRVEILRNFYFINRLTGYLRN

SEQ ID NO: 1129 - protein, 166 aa, Homo sapiens
MSYNLLGFRQRSSNFQCQKLLWQLNGRLEYCLKDRMNFDIPEEIKQLQQFQKEDAALTIYEMLQNIFAIFRQDSSSTGWNETIVENLLANVYHQINHLKTVLEEKLEKEDFTRGKLMSSLHLKRYYGRILHYLKAKEYSHCAWTIVRVEILRNFYFINRLTGYLRN

SEQ ID NO: 1130 - protein, 166 aa, Homo sapiens
MSYNLLGFSQRSSNFQCQKLLWQLNGRLEYCLKDRMNFDIPEEIKQLQQFQKEDAALTIYEMLQNIFAIFRQDSSSTGWNETIVENLLANVYHQINHLKTVLEEKLEKEDFTRGKLMSSLHLKRYYGRILHYLKAKEYSHCAWTIVRVEILRNFYFINRLTGYLRN

SEQ ID NO: 1131 - protein, 166 aa, Homo sapiens
MSYNLLGFLDRSSNFQCQKLLWQLNGRLEYCLKDRMNFDIPEEIKQLQQFQKEDAALTIYEMLQNIFAIFRQDSSSTGWNETIVENLLANVYHQINHLKTVLEEKLEKEDFTRGKLMSSLHLKRYYGRILHYLKAKEYSHCAWTIVRVEILRNFYFINRLTGYLRN

SEQ ID NO: 1132 - protein, 166 aa, Homo sapiens
MSYNLLGFLERSSNFQCQKLLWQLNGRLEYCLKDRMNFDIPEEIKQLQQFQKEDAALTIYEMLQNIFAIFRQDSSSTGWNETIVENLLANVYHQINHLKTVLEEKLEKEDFTRGKLMSSLHLKRYYGRILHYLKAKEYSHCAWTIVRVEILRNFYFINRLTGYLRN

SEQ ID NO: 1133 - protein, 166 aa, Homo sapiens
MSYNLLGFLKRSSNFQCQKLLWQLNGRLEYCLKDRMNFDIPEEIKQLQQFQKEDAALTIYEMLQNIFAIFRQDSSSTGWNETIVENLLANVYHQINHLKTVLEEKLEKEDFTRGKLMSSLHLKRYYGRILHYLKAKEYSHCAWTIVRVEILRNFYFINRLTGYLRN

SEQ ID NO: 1134 - protein, 166 aa, Homo sapiens
MSYNLLGFLNRSSNFQCQKLLWQLNGRLEYCLKDRMNFDIPEEIKQLQQFQKEDAALTIYEMLQNIFAIFRQDSSSTGWNETIVENLLANVYHQINHLKTVLEEKLEKEDFTRGKLMSSLHLKRYYGRILHYLKAKEYSHCAWTIVRVEILRNFYFINRLTGYLRN

SEQ ID NO: 1135 - protein, 166 aa, Homo sapiens
MSYNLLGFLRRSSNFQCQKLLWQLNGRLEYCLKDRMNFDIPEEIKQLQQFQKEDAALTIYEMLQNIFAIFRQDSSSTGWNETIVENLLANVYHQINHLKTVLEEKLEKEDFTRGKLMSSLHLKRYYGRILHYLKAKEYSHCAWTIVRVEILRNFYFINRLTGYLRN

SEQ ID NO: 1136 - protein, 166 aa, Homo sapiens
MSYNLLGFLSRSSNFQCQKLLWQLNGRLEYCLKDRMNFDIPEEIKQLQQFQKEDAALTIYEMLQNIFAIFRQDSSSTGWNETIVENLLANVYHQINHLKTVLEEKLEKEDFTRGKLMSSLHLKRYYGRILHYLKAKEYSHCAWTIVRVEILRNFYFINRLTGYLRN

SEQ ID NO: 1137 - protein, 166 aa, Homo sapiens
MSYNLLGFLTRSSNFQCQKLLWQLNGRLEYCLKDRMNFDIPEEIKQLQQFQKEDAALTIYEMLQNIFAIFRQDSSSTGWNETIVENLLANVYHQINHLKTVLEEKLEKEDFTRGKLMSSLHLKRYYGRILHYLKAKEYSHCAWTIVRVEILRNFYFINRLTGYLRN

SEQ ID NO: 1138 - protein, 166 aa, Homo sapiens
MSYNLLGFLQRDSNFQCQKLLWQLNGRLEYCLKDRMNFDIPEEIKQLQQFQKEDAALTIYEMLQNIFAIFRQDSSSTGWNETIVENLLANVYHQINHLKTVLEEKLEKEDFTRGKLMSSLHLKRYYGRILHYLKAKEYSHCAWTIVRVEILRNFYFINRLTGYLRN

SEQ ID NO: 1139 - protein, 166 aa, Homo sapiens
MSYNLLGFLQRESNFQCQKLLWQLNGRLEYCLKDRMNFDIPEEIKQLQQFQKEDAALTIYEMLQNIFAIFRQDSSSTGWNETIVENLLANVYHQINHLKTVLEEKLEKEDFTRGKLMSSLHLKRYYGRILHYLKAKEYSHCAWTIVRVEILRNFYFINRLTGYLRN

SEQ ID NO: 1140 - protein, 166 aa, Homo sapiens
MSYNLLGFLQRKSNFQCQKLLWQLNGRLEYCLKDRMNFDIPEEIKQLQQFQKEDAALTIYEMLQNIFAIFRQDSSSTGWNETIVENLLANVYHQINHLKTVLEEKLEKEDFTRGKLMSSLHLKRYYGRILHYLKAKEYSHCAWTIVRVEILRNFYFINRLTGYLRN

SEQ ID NO: 1141 - protein, 166 aa, Homo sapiens
MSYNLLGFLQRRSNFQCQKLLWQLNGRLEYCLKDRMNFDIPEEIKQLQQFQKEDAALTIYEMLQNIFAIFRQDSSSTGWNETIVENLLANVYHQINHLKTVLEEKLEKEDFTRGKLMSSLHLKRYYGRILHYLKAKEYSHCAWTIVRVEILRNFYFINRLTGYLRN

SEQ ID NO: 1142 - protein, 166 aa, Homo sapiens
MSYNLLGFLQRSDNFQCQKLLWQLNGRLEYCLKDRMNFDIPEEIKQLQQFQKEDAALTIYEMLQNIFAIFRQDSSSTGWNETIVENLLANVYHQINHLKTVLEEKLEKEDFTRGKLMSSLHLKRYYGRILHYLKAKEYSHCAWTIVRVEILRNFYFINRLTGYLRN

SEQ ID NO: 1143 - protein, 166 aa, Homo sapiens
MSYNLLGFLQRSENFQCQKLLWQLNGRLEYCLKDRMNFDIPEEIKQLQQFQKEDAALTIYEMLQNIFAIFRQDSSSTGWNETIVENLLANVYHQINHLKTVLEEKLEKEDFTRGKLMSSLHLKRYYGRILHYLKAKEYSHCAWTIVRVEILRNFYFINRLTGYLRN

SEQ ID NO: 1144 - protein, 166 aa, Homo sapiens
MSYNLLGFLQRSKNFQCQKLLWQLNGRLEYCLKDRMNFDIPEEIKQLQQFQKEDAALTIYEMLQNIFAIFRQDSSSTGWNETIVENLLANVYHQINHLKTVLEEKLEKEDFTRGKLMSSLHLKRYYGRILHYLKAKEYSHCAWTIVRVEILRNFYFINRLTGYLRN

SEQ ID NO: 1145 - protein, 166 aa, Homo sapiens
MSYNLLGFLQRSNNFQCQKLLWQLNGRLEYCLKDRMNFDIPEEIKQLQQFQKEDAALTIYEMLQNIFAIFRQDSSSTGWNETIVENLLANVYHQINHLKTVLEEKLEKEDFTRGKLMSSLHLKRYYGRILHYLKAKEYSHCAWTIVRVEILRNFYFINRLTGYLRN

SEQ ID NO: 1146 - protein, 166 aa, Homo sapiens
MSYNLLGFLQRSQNFQCQKLLWQLNGRLEYCLKDRMNFDIPEEIKQLQQFQKEDAALTIYEMLQNIFAIFRQDSSSTGWNETIVENLLANVYHQINHLKTVLEEKLEKEDFTRGKLMSSLHLKRYYGRILHYLKAKEYSHCAWTIVRVEILRNFYFINRLTGYLRN

SEQ ID NO: 1147 - protein, 166 aa, Homo sapiens [sequence omitted]

SEQ ID NO: 1148 - protein, 166 aa, Homo sapiens
MSYNLLGFLQRSTNFQCQKLLWQLNGRLEYCLKDRMNFDIPEEIKQLQQFQKEDAALTIYEMLQNIFAIFRQDSSSTGWNETIVENLLANVYHQINHLKTVLEEKLEKEDFTRGKLMSSLHLKRYYGRILHYLKAKEYSHCAWTIVRVEILRNFYFINRLTGYLRN

SEQ ID NO: 1149 - protein, 166 aa, Homo sapiens
MSYNLLGFLQRSSDFQCQKLLWQLNGRLEYCLKDRMNFDIPEEIKQLQQFQKEDAALTIYEMLQNIFAIFRQDSSSTGWNETIVENLLANVYHQINHLKTVLEEKLEKEDFTRGKLMSSLHLKRYYGRILHYLKAKEYSHCAWTIVRVEILRNFYFINRLTGYLRN

SEQ ID NO: 1150 - protein, 166 aa, Homo sapiens
MSYNLLGFLQRSSEFQCQKLLWQLNGRLEYCLKDRMNFDIPEEIKQLQQFQKEDAALTIYEMLQNIFAIFRQDSSSTGWNETIVENLLANVYHQINHLKTVLEEKLEKEDFTRGKLMSSLHLKRYYGRILHYLKAKEYSHCAWTIVRVEILRNFYFINRLTGYLRN

SEQ ID NO: 1151 - protein, 166 aa, Homo sapiens
MSYNLLGFLQRSSKFQCQKLLWQLNGRLEYCLKDRMNFDIPEEIKQLQQFQKEDAALTIYEMLQNIFAIFRQDSSSTGWNETIVENLLANVYHQINHLKTVLEEKLEKEDFTRGKLMSSLHLKRYYGRILHYLKAKEYSHCAWTIVRVEILRNFYFINRLTGYLRN

SEQ ID NO: 1152 - protein, 166 aa, Homo sapiens
MSYNLLGFLQRSSQFQCQKLLWQLNGRLEYCLKDRMNFDIPEEIKQLQQFQKEDAALTIYEMLQNIFAIFRQDSSSTGWNETIVENLLANVYHQINHLKTVLEEKLEKEDFTRGKLMSSLHLKRYYGRILHYLKAKEYSHCAWTIVRVEILRNFYFINRLTGYLRN

SEQ ID NO: 1153 - protein, 166 aa, Homo sapiens
MSYNLLGFLQRSSRFQCQKLLWQLNGRLEYCLKDRMNFDIPEEIKQLQQFQKEDAALTIYEMLQNIFAIFRQDSSSTGWNETIVENLLANVYHQINHLKTVLEEKLEKEDFTRGKLMSSLHLKRYYGRILHYLKAKEYSHCAWTIVRVEILRNFYFINRLTGYLRN

SEQ ID NO: 1154 - protein, 166 aa, Homo sapiens
MSYNLLGFLQRSSSFQCQKLLWQLNGRLEYCLKDRMNFDIPEEIKQLQQFQKEDAALTIYEMLQNIFAIFRQDSSSTGWNETIVENLLANVYHQINHLKTVLEEKLEKEDFTRGKLMSSLHLKRYYGRILHYLKAKEYSHCAWTIVRVEILRNFYFINRLTGYLRN

SEQ ID NO: 1155 - protein, 166 aa, Homo sapiens
MSYNLLGFLQRSSTFQCQKLLWQLNGRLEYCLKDRMNFDIPEEIKQLQQFQKEDAALTIYEMLQNIFAIFRQDSSSTGWNETIVENLLANVYHQINHLKTVLEEKLEKEDFTRGKLMSSLHLKRYYGRILHYLKAKEYSHCAWTIVRVEILRNFYFINRLTGYLRN

SEQ ID NO: 1156 - protein, 166 aa, Homo sapiens
MSYNLLGFLQRSSNDQCQKLLWQLNGRLEYCLKDRMNFDIPEEIKQLQQFQKEDAALTIYEMLQNIFAIFRQDSSSTGWNETIVENLLANVYHQINHLKTVLEEKLEKEDFTRGKLMSSLHLKRYYGRILHYLKAKEYSHCAWTIVRVEILRNFYFINRLTGYLRN

SEQ ID NO: 1157 - protein, 166 aa, Homo sapiens
MSYNLLGFLQRSSNEQCQKLLWQLNGRLEYCLKDRMNFDIPEEIKQLQQFQKEDAALTIYEMLQNIFAIFRQDSSSTGWNETIVENLLANVYHQINHLKTVLEEKLEKEDFTRGKLMSSLHLKRYYGRILHYLKAKEYSHCAWTIVRVEILRNFYFINRLTGYLRN

SEQ ID NO: 1158 - protein, 166 aa, Homo sapiens
MSYNLLGFLQRSSNKQCQKLLWQLNGRLEYCLKDRMNFDIPEEIKQLQQFQKEDAALTIYEMLQNIFAIFRQDSSSTGWNETIVENLLANVYHQINHLKTVLEEKLEKEDFTRGKLMSSLHLKRYYGRILHYLKAKEYSHCAWTIVRVEILRNFYFINRLTGYLRN

SEQ ID NO: 1159 - protein, 166 aa, Homo sapiens
MSYNLLGFLQRSSNRQCQKLLWQLNGRLEYCLKDRMNFDIPEEIKQLQQFQKEDAALTIYEMLQNIFAIFRQDSSSTGWNETIVENLLANVYHQINHLKTVLEEKLEKEDFTRGKLMSSLHLKRYYGRILHYLKAKEYSHCAWTIVRVEILRNFYFINRLTGYLRN

SEQ ID NO: 1160 - protein, 166 aa, Homo sapiens
MSYNLLGFLQRSSNFDCQKLLWQLNGRLEYCLKDRMNFDIPEEIKQLQQFQKEDAALTIYEMLQNIFAIFRQDSSSTGWNETIVENLLANVYHQINHLKTVLEEKLEKEDFTRGKLMSSLHLKRYYGRILHYLKAKEYSHCAWTIVRVEILRNFYFINRLTGYLRN

SEQ ID NO: 1161 - protein, 166 aa, Homo sapiens
MSYNLLGFLQRSSNFECQKLLWQLNGRLEYCLKDRMNFDIPEEIKQLQQFQKEDAALTIYEMLQNIFAIFRQDSSSTGWNETIVENLLANVYHQINHLKTVLEEKLEKEDFTRGKLMSSLHLKRYYGRILHYLKAKEYSHCAWTIVRVEILRNFYFINRLTGYLRN

SEQ ID NO: 1162 - protein, 166 aa, Homo sapiens
MSYNLLGFLQRSSNFKCQKLLWQLNGRLEYCLKDRMNFDIPEEIKQLQQFQKEDAALTIYEMLQNIFAIFRQDSSSTGWNETIVENLLANVYHQINHLKTVLEEKLEKEDFTRGKLMSSLHLKRYYGRILHYLKAKEYSHCAWTIVRVEILRNFYFINRLTGYLRN

SEQ ID NO: 1163 - protein, 166 aa, Homo sapiens
MSYNLLGFLQRSSNFNCQKLLWQLNGRLEYCLKDRMNFDIPEEIKQLQQFQKEDAALTIYEMLQNIFAIFRQDSSSTGWNETIVENLLANVYHQINHLKTVLEEKLEKEDFTRGKLMSSLHLKRYYGRILHYLKAKEYSHCAWTIVRVEILRNFYFINRLTGYLRN

SEQ ID NO: 1164 - protein, 166 aa, Homo sapiens
MSYNLLGFLQRSSNFRCQKLLWQLNGRLEYCLKDRMNFDIPEEIKQLQQFQKEDAALTIYEMLQNIFAIFRQDSSSTGWNETIVENLLANVYHQINHLKTVLEEKLEKEDFTRGKLMSSLHLKRYYGRILHYLKAKEYSHCAWTIVRVEILRNFYFINRLTGYLRN

SEQ ID NO: 1165 - protein, 166 aa, Homo sapiens
MSYNLLGFLQRSSNFSCQKLLWQLNGRLEYCLKDRMNFDIPEEIKQLQQFQKEDAALTIYEMLQNIFAIFRQDSSSTGWNETIVENLLANVYHQINHLKTVLEEKLEKEDFTRGKLMSSLHLKRYYGRILHYLKAKEYSHCAWTIVRVEILRNFYFINRLTGYLRN

SEQ ID NO: 1166 - protein, 166 aa, Homo sapiens
MSYNLLGFLQRSSNFTCQKLLWQLNGRLEYCLKDRMNFDIPEEIKQLQQFQKEDAALTIYEMLQNIFAIFRQDSSSTGWNETIVENLLANVYHQINHLKTVLEEKLEKEDFTRGKLMSSLHLKRYYGRILHYLKAKEYSHCAWTIVRVEILRNFYFINRLTGYLRN

SEQ ID NO: 1167 - protein, 166 aa, Homo sapiens
MSYNLLGFLQRSSNFQDQKLLWQLNGRLEYCLKDRMNFDIPEEIKQLQQFQKEDAALTIYEMLQNIFAIFRQDSSSTGWNETIVENLLANVYHQINHLKTVLEEKLEKEDFTRGKLMSSLHLKRYYGRILHYLKAKEYSHCAWTIVRVEILRNFYFINRLTGYLRN

SEQ ID NO: 1168 - protein, 166 aa, Homo sapiens
MSYNLLGFLQRSSNFQEQKLLWQLNGRLEYCLKDRMNFDIPEEIKQLQQFQKEDAALTIYEMLQNIFAIFRQDSSSTGWNETIVENLLANVYHQINHLKTVLEEKLEKEDFTRGKLMSSLHLKRYYGRILHYLKAKEYSHCAWTIVRVEILRNFYFINRLTGYLRN

SEQ ID NO: 1169 - protein, 166 aa, Homo sapiens
MSYNLLGFLQRSSNFQKQKLLWQLNGRLEYCLKDRMNFDIPEEIKQLQQFQKEDAALTIYEMLQNIFAIFRQDSSSTGWNETIVENLLANVYHQINHLKTVLEEKLEKEDFTRGKLMSSLHLKRYYGRILHYLKAKEYSHCAWTIVRVEILRNFYFINRLTGYLRN

SEQ ID NO: 1170 - protein, 166 aa, Homo sapiens
MSYNLLGFLQRSSNFQNQKLLWQLNGRLEYCLKDRMNFDIPEEIKQLQQFQKEDAALTIYEMLQNIFAIFRQDSSSTGWNETIVENLLANVYHQINHLKTVLEEKLEKEDFTRGKLMSSLHLKRYYGRILHYLKAKEYSHCAWTIVRVEILRNFYFINRLTGYLRN

SEQ ID NO: 1171 - protein, 166 aa, Homo sapiens
MSYNLLGFLQRSSNFQQQKLLWQLNGRLEYCLKDRMNFDIPEEIKQLQQFQKEDAALTIYEMLQNIFAIFRQDSSSTGWNETIVENLLANVYHQINHLKTVLEEKLEKEDFTRGKLMSSLHLKRYYGRILHYLKAKEYSHCAWTIVRVEILRNFYFINRLTGYLRN

SEQ ID NO: 1172 - protein, 166 aa, Homo sapiens
MSYNLLGFLQRSSNFQRQKLLWQLNGRLEYCLKDRMNFDIPEEIKQLQQFQKEDAALTIYEMLQNIFAIFRQDSSSTGWNETIVENLLANVYHQINHLKTVLEEKLEKEDFTRGKLMSSLHLKRYYGRILHYLKAKEYSHCAWTIVRVEILRNFYFINRLTGYLRN

SEQ ID NO: 1173 - protein, 166 aa, Homo sapiens
MSYNLLGFLQRSSNFQSQKLLWQLNGRLEYCLKDRMNFDIPEEIKQLQQFQKEDAALTIYEMLQNIFAIFRQDSSSTGWNETIVENLLANVYHQINHLKTVLEEKLEKEDFTRGKLMSSLHLKRYYGRILHYLKAKEYSHCAWTIVRVEILRNFYFINRLTGYLRN

SEQ ID NO: 1174 - protein, 166 aa, Homo sapiens
MSYNLLGFLQRSSNFQTQKLLWQLNGRLEYCLKDRMNFDIPEEIKQLQQFQKEDAALTIYEMLQNIFAIFRQDSSSTGWNETIVENLLANVYHQINHLKTVLEEKLEKEDFTRGKLMSSLHLKRYYGRILHYLKAKEYSHCAWTIVRVEILRNFYFINRLTGYLRN

SEQ ID NO: 1175 - protein, 166 aa, Homo sapiens
MSYNLLGFLQRSSNFQCQKNLWQLNGRLEYCLKDRMNFDIPEEIKQLQQFQKEDAALTIYEMLQNIFAIFRQDSSSTGWNETIVENLLANVYHQINHLKTVLEEKLEKEDFTRGKLMSSLHLKRYYGRILHYLKAKEYSHCAWTIVRVEILRNFYFINRLTGYLRN

SEQ ID NO: 1176 - protein, 166 aa, Homo sapiens
MSYNLLGFLQRSSNFQCQKQLWQLNGRLEYCLKDRMNFDIPEEIKQLQQFQKEDAALTIYEMLQNIFAIFRQDSSSTGWNETIVENLLANVYHQINHLKTVLEEKLEKEDFTRGKLMSSLHLKRYYGRILHYLKAKEYSHCAWTIVRVEILRNFYFINRLTGYLRN

SEQ ID NO: 1177 - protein, 166 aa, Homo sapiens
MSYNLLGFLQRSSNFQCQKRLWQLNGRLEYCLKDRMNFDIPEEIKQLQQFQKEDAALTIYEMLQNIFAIFRQDSSSTGWNETIVENLLANVYHQINHLKTVLEEKLEKEDFTRGKLMSSLHLKRYYGRILHYLKAKEYSHCAWTIVRVEILRNFYFINRLTGYLRN

SEQ ID NO: 1178 - protein, 166 aa, Homo sapiens
MSYNLLGFLQRSSNFQCQKSLWQLNGRLEYCLKDRMNFDIPEEIKQLQQFQKEDAALTIYEMLQNIFAIFRQDSSSTGWNETIVENLLANVYHQINHLKTVLEEKLEKEDFTRGKLMSSLHLKRYYGRILHYLKAKEYSHCAWTIVRVEILRNFYFINRLTGYLRN

SEQ ID NO: 1179 - protein, 166 aa, Homo sapiens
MSYNLLGFLQRSSNFQCQKTLWQLNGRLEYCLKDRMNFDIPEEIKQLQQFQKEDAALTIYEMLQNIFAIFRQDSSSTGWNETIVENLLANVYHQINHLKTVLEEKLEKEDFTRGKLMSSLHLKRYYGRILHYLKAKEYSHCAWTIVRVEILRNFYFINRLTGYLRN

SEQ ID NO: 1180 - protein, 166 aa, Homo sapiens
MSYNLLGFLQRSSNFQCQKDLWQLNGRLEYCLKDRMNFDIPEEIKQLQQFQKEDAALTIYEMLQNIFAIFRQDSSSTGWNETIVENLLANVYHQINHLKTVLEEKLEKEDFTRGKLMSSLHLKRYYGRILHYLKAKEYSHCAWTIVRVEILRNFYFINRLTGYLRN

SEQ ID NO: 1181 - protein, 166 aa, Homo sapiens
MSYNLLGFLQRSSNFQCQKELWQLNGRLEYCLKDRMNFDIPEEIKQLQQFQKEDAALTIYEMLQNIFAIFRQDSSSTGWNETIVENLLANVYHQINHLKTVLEEKLEKEDFTRGKLMSSLHLKRYYGRILHYLKAKEYSHCAWTIVRVEILRNFYFINRLTGYLRN

SEQ ID NO: 1182 - protein, 166 aa, Homo sapiens
MSYNLLGFLQRSSNFQCQKKLWQLNGRLEYCLKDRMNFDIPEEIKQLQQFQKEDAALTIYEMLQNIFAIFRQDSSSTGWNETIVENLLANVYHQINHLKTVLEEKLEKEDFTRGKLMSSLHLKRYYGRILHYLKAKEYSHCAWTIVRVEILRNFYFINRLTGYLRN

SEQ ID NO: 1183 - protein, 166 aa, Homo sapiens
MSYNLLGFLQRSSNFQCQKLLDQLNGRLEYCLKDRMNFDIPEEIKQLQQFQKEDAALTIYEMLQNIFAIFRQDSSSTGWNETIVENLLANVYHQINHLKTVLEEKLEKEDFTRGKLMSSLHLKRYYGRILHYLKAKEYSHCAWTIVRVEILRNFYFINRLTGYLRN

SEQ ID NO: 1184 - protein, 166 aa, Homo sapiens
MSYNLLGFLQRSSNFQCQKLLEQLNGRLEYCLKDRMNFDIPEEIKQLQQFQKEDAALTIYEMLQNIFAIFRQDSSSTGWNETIVENLLANVYHQINHLKTVLEEKLEKEDFTRGKLMSSLHLKRYYGRILHYLKAKEYSHCAWTIVRVEILRNFYFINRLTGYLRN

SEQ ID NO: 1185 - protein, 166 aa, Homo sapiens
MSYNLLGFLQRSSNFQCQKLLKQLNGRLEYCLKDRMNFDIPEEIKQLQQFQKEDAALTIYEMLQNIFAIFRQDSSSTGWNETIVENLLANVYHQINHLKTVLEEKLEKEDFTRGKLMSSLHLKRYYGRILHYLKAKEYSHCAWTIVRVEILRNFYFINRLTGYLRN

SEQ ID NO: 1186 - protein, 166 aa, Homo sapiens
MSYNLLGFLQRSSNFQCQKLLRQLNGRLEYCLKDRMNFDIPEEIKQLQQFQKEDAALTIYEMLQNIFAIFRQDSSSTGWNETIVENLLANVYHQINHLKTVLEEKLEKEDFTRGKLMSSLHLKRYYGRILHYLKAKEYSHCAWTIVRVEILRNFYFINRLTGYLRN

SEQ ID NO: 1187 - protein, 166 aa, Homo sapiens
MSYNLLGFLQRSSNFQCQKLLWDLNGRLEYCLKDRMNFDIPEEIKQLQQFQKEDAALTIYEMLQNIFAIFRQDSSSTGWNETIVENLLANVYHQINHLKTVLEEKLEKEDFTRGKLMSSLHLKRYYGRILHYLKAKEYSHCAWTIVRVEILRNFYFINRLTGYLRN

SEQ ID NO: 1188 - protein, 166 aa, Homo sapiens
MSYNLLGFLQRSSNFQCQKLLWELNGRLEYCLKDRMNFDIPEEIKQLQQFQKEDAALTIYEMLQNIFAIFRQDSSSTGWNETIVENLLANVYHQINHLKTVLEEKLEKEDFTRGKLMSSLHLKRYYGRILHYLKAKEYSHCAWTIVRVEILRNFYFINRLTGYLRN

SEQ ID NO: 1189 - protein, 166 aa, Homo sapiens
MSYNLLGFLQRSSNFQCQKLLWKLNGRLEYCLKDRMNFDIPEEIKQLQQFQKEDAALTIYEMLQNIFAIFRQDSSSTGWNETIVENLLANVYHQINHLKTVLEEKLEKEDFTRGKLMSSLHLKRYYGRILHYLKAKEYSHCAWTIVRVEILRNFYFINRLTGYLRN

SEQ ID NO: 1190 - protein, 166 aa, Homo sapiens
MSYNLLGFLQRSSNFQCQKLLWRLNGRLEYCLKDRMNFDIPEEIKQLQQFQKEDAALTIYEMLQNIFAIFRQDSSSTGWNETIVENLLANVYHQINHLKTVLEEKLEKEDFTRGKLMSSLHLKRYYGRILHYLKAKEYSHCAWTIVRVEILRNFYFINRLTGYLRN

SEQ ID NO: 1191 - protein, 166 aa, Homo sapiens
MSYNLLGFLQRSSNFQCQKLLWQDNGRLEYCLKDRMNFDIPEEIKQLQQFQKEDAALTIYEMLQNIFAIFRQDSSSTGWNETIVENLLANVYHQINHLKTVLEEKLEKEDFTRGKLMSSLHLKRYYGRILHYLKAKEYSHCAWTIVRVEILRNFYFINRLTGYLRN

SEQ ID NO: 1192 - protein, 166 aa, Homo sapiens
MSYNLLGFLQRSSNFQCQKLLWQENGRLEYCLKDRMNFDIPEEIKQLQQFQKEDAALTIYEMLQNIFAIFRQDSSSTGWNETIVENLLANVYHQINHLKTVLEEKLEKEDFTRGKLMSSLHLKRYYGRILHYLKAKEYSHCAWTIVRVEILRNFYFINRLTGYLRN

SEQ ID NO: 1193 - protein, 166 aa, Homo sapiens
MSYNLLGFLQRSSNFQCQKLLWQKNGRLEYCLKDRMNFDIPEEIKQLQQFQKEDAALTIYEMLQNIFAIFRQDSSSTGWNETIVENLLANVYHQINHLKTVLEEKLEKEDFTRGKLMSSLHLKRYYGRILHYLKAKEYSHCAWTIVRVEILRNFYFINRLTGYLRN

SEQ ID NO: 1194 - protein, 166 aa, Homo sapiens
MSYNLLGFLQRSSNFQCQKLLWQRNGRLEYCLKDRMNFDIPEEIKQLQQFQKEDAALTIYEMLQNIFAIFRQDSSSTGWNETIVENLLANVYHQINHLKTVLEEKLEKEDFTRGKLMSSLHLKRYYGRILHYLKAKEYSHCAWTIVRVEILRNFYFINRLTGYLRN

SEQ ID NO: 1195 - protein, 166 aa, Homo sapiens
MSYNLLGFLQRSSNFQCQKLLWQLNGRLEYCLKDRMNFDIPEEIKQLQQFQKEDAALTIYEMLQNIFAIFRQDSSSTDWNETIVENLLANVYHQINHLKTVLEEKLEKEDFTRGKLMSSLHLKRYYGRILHYLKAKEYSHCAWTIVRVEILRNFYFINRLTGYLRN

SEQ ID NO: 1196 - protein, 166 aa, Homo sapiens
MSYNLLGFLQRSSNFQCQKLLWQLNGRLEYCLKDRMNFDIPEEIKQLQQFQKEDAALTIYEMLQNIFAIFRQDSSSTEWNETIVENLLANVYHQINHLKTVLEEKLEKEDFTRGKLMSSLHLKRYYGRILHYLKAKEYSHCAWTIVRVEILRNFYFINRLTGYLRN

SEQ ID NO: 1197 - protein, 166 aa, Homo sapiens
MSYNLLGFLQRSSNFQCQKLLWQLNGRLEYCLKDRMNFDIPEEIKQLQQFQKEDAALTIYEMLQNIFAIFRQDSSSTKWNETIVENLLANVYHQINHLKTVLEEKLEKEDFTRGKLMSSLHLKRYYGRILHYLKAKEYSHCAWTIVRVEILRNFYFINRLTGYLRN

SEQ ID NO: 1198 - protein, 166 aa, Homo sapiens
MSYNLLGFLQRSSNFQCQKLLWQLNGRLEYCLKDRMNFDIPEEIKQLQQFQKEDAALTIYEMLQNIFAIFRQDSSSTRWNETIVENLLANVYHQINHLKTVLEEKLEKEDFTRGKLMSSLHLKRYYGRILHYLKAKEYSHCAWTIVRVEILRNFYFINRLTGYLRN

SEQ ID NO: 1199 - protein, 166 aa, Homo sapiens
MSYNLLGFLQRSSNFQCQKLLWQLNGRLEYCLKDRMNFDIPEEIKQLQQFQKEDAALTIYEMLQNIFAIFRQDSSSTGDNETIVENLLANVYHQINHLKTVLEEKLEKEDFTRGKLMSSLHLKRYYGRILHYLKAKEYSHCAWTIVRVEILRNFYFINRLTGYLRN

SEQ ID NO: 1200 - protein, 166 aa, Homo sapiens
MSYNLLGFLQRSSNFQCQKLLWQLNGRLEYCLKDRMNFDIPEEIKQLQQFQKEDAALTIYEMLQNIFAIFRQDSSSTGENETIVENLLANVYHQINHLKTVLEEKLEKEDFTRGKLMSSLHLKRYYGRILHYLKAKEYSHCAWTIVRVEILRNFYFINRLTGYLRN

SEQ ID NO: 1201 - protein, 166 aa, Homo sapiens
MSYNLLGFLQRSSNFQCQKLLWQLNGRLEYCLKDRMNFDIPEEIKQLQQFQKEDAALTIYEMLQNIFAIFRQDSSSTGKNETIVENLLANVYHQINHLKTVLEEKLEKEDFTRGKLMSSLHLKRYYGRILHYLKAKEYSHCAWTIVRVEILRNFYFINRLTGYLRN

SEQ ID NO: 1202 - protein, 166 aa, Homo sapiens
MSYNLLGFLQRSSNFQCQKLLWQLNGRLEYCLKDRMNFDIPEEIKQLQQFQKEDAALTIYEMLQNIFAIFRQDSSSTGRNETIVENLLANVYHQINHLKTVLEEKLEKEDFTRGKLMSSLHLKRYYGRILHYLKAKEYSHCAWTIVRVEILRNFYFINRLTGYLRN

SEQ ID NO: 1203 - protein, 166 aa, Homo sapiens
MSYNLLGFLQRSSNFQCQKLLWQLNGRLEYCLKDRMNFDIPEEIKQLQQFQKEDAALTIYEMLQNIFAIFRQDSSSTGWDETIVENLLANVYHQINHLKTVLEEKLEKEDFTRGKLMSSLHLKRYYGRILHYLKAKEYSHCAWTIVRVEILRNFYFINRLTGYLRN

SEQ ID NO: 1204 - protein, 166 aa, Homo sapiens
MSYNLLGFLQRSSNFQCQKLLWQLNGRLEYCLKDRMNFDIPEEIKQLQQFQKEDAALTIYEMLQNIFAIFRQDSSSTGWEETIVENLLANVYHQINHLKTVLEEKLEKEDFTRGKLMSSLHLKRYYGRILHYLKAKEYSHCAWTIVRVEILRNFYFINRLTGYLRN

SEQ ID NO: 1205 - protein, 166 aa, Homo sapiens
MSYNLLGFLQRSSNFQCQKLLWQLNGRLEYCLKDRMNFDIPEEIKQLQQFQKEDAALTIYEMLQNIFAIFRQDSSSTGWKETIVENLLANVYHQINHLKTVLEEKLEKEDFTRGKLMSSLHLKRYYGRILHYLKAKEYSHCAWTIVRVEILRNFYFINRLTGYLRN

SEQ ID NO: 1206 - protein, 166 aa, Homo sapiens
MSYNLLGFLQRSSNFQCQKLLWQLNGRLEYCLKDRMNFDIPEEIKQLQQFQKEDAALTIYEMLQNIFAIFRQDSSSTGWRETIVENLLANVYHQINHLKTVLEEKLEKEDFTRGKLMSSLHLKRYYGRILHYLKAKEYSHCAWTIVRVEILRNFYFINRLTGYLRN

SEQ ID NO: 1207 - protein, 166 aa, Homo sapiens
MSYNLLGFLQRSSNFQCQKLLWQLNGRLEYCLKDRMNFDIPEEIKQLQQFQKEDAALTIYEMLQNIFAIFRQDSSSTGWNEDIVENLLANVYHQINHLKTVLEEKLEKEDFTRGKLMSSLHLKRYYGRILHYLKAKEYSHCAWTIVRVEILRNFYFINRLTGYLRN

SEQ ID NO: 1208 - protein, 166 aa, Homo sapiens
MSYNLLGFLQRSSNFQCQKLLWQLNGRLEYCLKDRMNFDIPEEIKQLQQFQKEDAALTIYEMLQNIFAIFRQDSSSTGWNEEIVENLLANVYHQINHLKTVLEEKLEKEDFTRGKLMSSLHLKRYYGRILHYLKAKEYSHCAWTIVRVEILRNFYFINRLTGYLRN

SEQ ID NO: 1209 - protein, 166 aa, Homo sapiens
MSYNLLGFLQRSSNFQCQKLLWQLNGRLEYCLKDRMNFDIPEEIKQLQQFQKEDAALTIYEMLQNIFAIFRQDSSSTGWNEKIVENLLANVYHQINHLKTVLEEKLEKEDFTRGKLMSSLHLKRYYGRILHYLKAKEYSHCAWTIVRVEILRNFYFINRLTGYLRN

SEQ ID NO: 1210 - protein, 166 aa, Homo sapiens
MSYNLLGFLQRSSNFQCQKLLWQLNGRLEYCLKDRMNFDIPEEIKQLQQFQKEDAALTIYEMLQNIFAIFRQDSSSTGWNERIVENLLANVYHQINHLKTVLEEKLEKEDFTRGKLMSSLHLKRYYGRILHYLKAKEYSHCAWTIVRVEILRNFYFINRLTGYLRN

SEQ ID NO: 1211 - protein, 166 aa, Homo sapiens
MSYNLLGFLQRSSNFQCQKLLWQLNGRLEYCLKDRMNFDIPEEIKQLQQFQKEDAALTIYEMLQNIFAIFRQDSSSTGWNETDVENLLANVYHQINHLKTVLEEKLEKEDFTRGKLMSSLHLKRYYGRILHYLKAKEYSHCAWTIVRVEILRNFYFINRLTGYLRN

SEQ ID NO: 1212 - protein, 166 aa, Homo sapiens
MSYNLLGFLQRSSNFQCQKLLWQLNGRLEYCLKDRMNFDIPEEIKQLQQFQKEDAALTIYEMLQNIFAIFRQDSSSTGWNETEVENLLANVYHQINHLKTVLEEKLEKEDFTRGKLMSSLHLKRYYGRILHYLKAKEYSHCAWTIVRVEILRNFYFINRLTGYLRN

SEQ ID NO: 1213 - protein, 166 aa, Homo sapiens
MSYNLLGFLQRSSNFQCQKLLWQLNGRLEYCLKDRMNFDIPEEIKQLQQFQKEDAALTIYEMLQNIFAIFRQDSSSTGWNETKVENLLANVYHQINHLKTVLEEKLEKEDFTRGKLMSSLHLKRYYGRILHYLKAKEYSHCAWTIVRVEILRNFYFINRLTGYLRN

SEQ ID NO: 1214 - protein, 166 aa, Homo sapiens
MSYNLLGFLQRSSNFQCQKLLWQLNGRLEYCLKDRMNFDIPEEIKQLQQFQKEDAALTIYEMLQNIFAIFRQDSSSTGWNETRVENLLANVYHQINHLKTVLEEKLEKEDFTRGKLMSSLHLKRYYGRILHYLKAKEYSHCAWTIVRVEILRNFYFINRLTGYLRN

SEQ ID NO: 1215 - protein, 166 aa, Homo sapiens
MSYNLLGFLQRSSNFQCQKLLWQLNGRLEYCLKDRMNFDIPEEIKQLQQFQKEDAALTIYEMLQNIFAIFRQDSSSTGWNETNVENLLANVYHQINHLKTVLEEKLEKEDFTRGKLMSSLHLKRYYGRILHYLKAKEYSHCAWTIVRVEILRNFYFINRLTGYLRN

SEQ ID NO: 1216 - protein, 166 aa, Homo sapiens
MSYNLLGFLQRSSNFQCQKLLWQLNGRLEYCLKDRMNFDIPEEIKQLQQFQKEDAALTIYEMLQNIFAIFRQDSSSTGWNETQVENLLANVYHQINHLKTVLEEKLEKEDFTRGKLMSSLHLKRYYGRILHYLKAKEYSHCAWTIVRVEILRNFYFINRLTGYLRN

SEQ ID NO: 1217 - protein, 166 aa, Homo sapiens
MSYNLLGFLQRSSNFQCQKLLWQLNGRLEYCLKDRMNFDIPEEIKQLQQFQKEDAALTIYEMLQNIFAIFRQDSSSTGWNETSVENLLANVYHQINHLKTVLEEKLEKEDFTRGKLMSSLHLKRYYGRILHYLKAKEYSHCAWTIVRVEILRNFYFINRLTGYLRN

SEQ ID NO: 1218 - protein, 166 aa, Homo sapiens
MSYNLLGFLQRSSNFQCQKLLWQLNGRLEYCLKDRMNFDIPEEIKQLQQFQKEDAALTIYEMLQNIFAIFRQDSSSTGWNETTVENLLANVYHQINHLKTVLEEKLEKEDFTRGKLMSSLHLKRYYGRILHYLKAKEYSHCAWTIVRVEILRNFYFINRLTGYLRN

SEQ ID NO: 1219 - protein, 166 aa, Homo sapiens
MSYNLLGFLQRSSNFQCQKLLWQLNGRLEYCLKDRMNFDIPEEIKQLQQFQKEDAALTIYEMLQNIFAIFRQDSSSTGWNETIVEDLLANVYHQINHLKTVLEEKLEKEDFTRGKLMSSLHLKRYYGRILHYLKAKEYSHCAWTIVRVEILRNFYFINRLTGYLRN

SEQ ID NO: 1220 - protein, 166 aa, Homo sapiens
MSYNLLGFLQRSSNFQCQKLLWQLNGRLEYCLKDRMNFDIPEEIKQLQQFQKEDAALTIYEMLQNIFAIFRQDSSSTGWNETIVEELLANVYHQINHLKTVLEEKLEKEDFTRGKLMSSLHLKRYYGRILHYLKAKEYSHCAWTIVRVEILRNFYFINRLTGYLRN

SEQ ID NO: 1221 - protein, 166 aa, Homo sapiens
MSYNLLGFLQRSSNFQCQKLLWQLNGRLEYCLKDRMNFDIPEEIKQLQQFQKEDAALTIYEMLQNIFAIFRQDSSSTGWNETIVEKLLANVYHQINHLKTVLEEKLEKEDFTRGKLMSSLHLKRYYGRILHYLKAKEYSHCAWTIVRVEILRNFYFINRLTGYLRN

SEQ ID NO: 1222 - protein, 166 aa, Homo sapiens
MSYNLLGFLQRSSNFQCQKLLWQLNGRLEYCLKDRMNFDIPEEIKQLQQFQKEDAALTIYEMLQNIFAIFRQDSSSTGWNETIVERLLANVYHQINHLKTVLEEKLEKEDFTRGKLMSSLHLKRYYGRILHYLKAKEYSHCAWTIVRVEILRNFYFINRLTGYLRN

SEQ ID NO: 1223 - protein, 166 aa, Homo sapiens
MSYNLLGFLQRSSNFQCQKLLWQLNGRLEYCLKDRMNFDIPEEIKQLQQFQKEDAALTIYEMLQNIFAIFRQDSSSTGWNETIVEQLLANVYHQINHLKTVLEEKLEKEDFTRGKLMSSLHLKRYYGRILHYLKAKEYSHCAWTIVRVEILRNFYFINRLTGYLRN

SEQ ID NO: 1224 - protein, 166 aa, Homo sapiens
MSYNLLGFLQRSSNFQCQKLLWQLNGRLEYCLKDRMNFDIPEEIKQLQQFQKEDAALTIYEMLQNIFAIFRQDSSSTGWNETIVESLLANVYHQINHLKTVLEEKLEKEDFTRGKLMSSLHLKRYYGRILHYLKAKEYSHCAWTIVRVEILRNFYFINRLTGYLRN

SEQ ID NO: 1225 - protein, 166 aa, Homo sapiens
MSYNLLGFLQRSSNFQCQKLLWQLNGRLEYCLKDRMNFDIPEEIKQLQQFQKEDAALTIYEMLQNIFAIFRQDSSSTGWNETIVETLLANVYHQINHLKTVLEEKLEKEDFTRGKLMSSLHLKRYYGRILHYLKAKEYSHCAWTIVRVEILRNFYFINRLTGYLRN

SEQ ID NO: 1226 - protein, 166 aa, Homo sapiens
MSYNLLGFLQRSSNFQCQKLLWQLNGRLEYCLKDRMNFDIPEEIKQLQQFQKEDAALTIYEMLQNIFAIFRQDSSSTGWNETIVENDLANVYHQINHLKTVLEEKLEKEDFTRGKLMSSLHLKRYYGRILHYLKAKEYSHCAWTIVRVEILRNFYFINRLTGYLRN

SEQ ID NO: 1227 - protein, 166 aa, Homo sapiens
MSYNLLGFLQRSSNFQCQKLLWQLNGRLEYCLKDRMNFDIPEEIKQLQQFQKEDAALTIYEMLQNIFAIFRQDSSSTGWNETIVENELANVYHQINHLKTVLEEKLEKEDFTRGKLMSSLHLKRYYGRILHYLKAKEYSHCAWTIVRVEILRNFYFINRLTGYLRN

SEQ ID NO: 1228 - protein, 166 aa, Homo sapiens
MSYNLLGFLQRSSNFQCQKLLWQLNGRLEYCLKDRMNFDIPEEIKQLQQFQKEDAALTIYEMLQNIFAIFRQDSSSTGWNETIVENKLANVYHQINHLKTVLEEKLEKEDFTRGKLMSSLHLKRYYGRILHYLKAKEYSHCAWTIVRVEILRNFYFINRLTGYLRN

SEQ ID NO: 1229 - protein, 166 aa, Homo sapiens
MSYNLLGFLQRSSNFQCQKLLWQLNGRLEYCLKDRMNFDIPEEIKQLQQFQKEDAALTIYEMLQNIFAIFRQDSSSTGWNETIVENRLANVYHQINHLKTVLEEKLEKEDFTRGKLMSSLHLKRYYGRILHYLKAKEYSHCAWTIVRVEILRNFYFINRLTGYLRN

SEQ ID NO: 1230 - protein, 166 aa, Homo sapiens
MSYNLLGFLQRSSNFQCQKLLWQLNGRLEYCLKDRMNFDIPEEIKQLQQFQKEDAALTIYEMLQNIFAIFRQDSSSTGWNETIVENNLANVYHQINHLKTVLEEKLEKEDFTRGKLMSSLHLKRYYGRILHYLKAKEYSHCAWTIVRVEILRNFYFINRLTGYLRN

SEQ ID NO: 1231 - protein, 166 aa, Homo sapiens
MSYNLLGFLQRSSNFQCQKLLWQLNGRLEYCLKDRMNFDIPEEIKQLQQFQKEDAALTIYEMLQNIFAIFRQDSSSTGWNETIVENQLANVYHQINHLKTVLEEKLEKEDFTRGKLMSSLHLKRYYGRILHYLKAKEYSHCAWTIVRVEILRNFYFINRLTGYLRN

SEQ ID NO: 1232 - protein, 166 aa, Homo sapiens
MSYNLLGFLQRSSNFQCQKLLWQLNGRLEYCLKDRMNFDIPEEIKQLQQFQKEDAALTIYEMLQNIFAIFRQDSSSTGWNETIVENSLANVYHQINHLKTVLEEKLEKEDFTRGKLMSSLHLKRYYGRILHYLKAKEYSHCAWTIVRVEILRNFYFINRLTGYLRN

SEQ ID NO: 1233 - protein, 166 aa, Homo sapiens
MSYNLLGFLQRSSNFQCQKLLWQLNGRLEYCLKDRMNFDIPEEIKQLQQFQKEDAALTIYEMLQNIFAIFRQDSSSTGWNETIVENTLANVYHQINHLKTVLEEKLEKEDFTRGKLMSSLHLKRYYGRILHYLKAKEYSHCAWTIVRVEILRNFYFINRLTGYLRN

SEQ ID NO: 1234 - protein, 166 aa, Homo sapiens
MSYNLLGFLQRSSNFQCQKLLWQLNGRLEYCLKDRMNFDIPEEIKQLQQFQKEDAALTIYEMLQNIFAIFRQDSSSTGWNETIVENLLDNVYHQINHLKTVLEEKLEKEDFTRGKLMSSLHLKRYYGRILHYLKAKEYSHCAWTIVRVEILRNFYFINRLTGYLRN

SEQ ID NO: 1235 - protein, 166 aa, Homo sapiens
MSYNLLGFLQRSSNFQCQKLLWQLNGRLEYCLKDRMNFDIPEEIKQLQQFQKEDAALTIYEMLQNIFAIFRQDSSSTGWNETIVENLLENVYHQINHLKTVLEEKLEKEDFTRGKLMSSLHLKRYYGRILHYLKAKEYSHCAWTIVRVEILRNFYFINRLTGYLRN

SEQ ID NO: 1236 - protein, 166 aa, Homo sapiens
MSYNLLGFLQRSSNFQCQKLLWQLNGRLEYCLKDRMNFDIPEEIKQLQQFQKEDAALTIYEMLQNIFAIFRQDSSSTGWNETIVENLLKNVYHQINHLKTVLEEKLEKEDFTRGKLMSSLHLKRYYGRILHYLKAKEYSHCAWTIVRVEILRNFYFINRLTGYLRN

SEQ ID NO: 1237 - protein, 166 aa, Homo sapiens
MSYNLLGFLQRSSNFQCQKLLWQLNGRLEYCLKDRMNFDIPEEIKQLQQFQKEDAALTIYEMLQNIFAIFRQDSSSTGWNETIVENLLRNVYHQINHLKTVLEEKLEKEDFTRGKLMSSLHLKRYYGRILHYLKAKEYSHCAWTIVRVEILRNFYFINRLTGYLRN

SEQ ID NO: 1238 - protein, 166 aa, Homo sapiens
MSYNLLGFLQRSSNFQCQKLLWQLNGRLEYCLKDRMNFDIPEEIKQLQQFQKEDAALTIYEMLQNIFAIFRQDSSSTGWNETIVENLLADVYHQINHLKTVLEEKLEKEDFTRGKLMSSLHLKRYYGRILHYLKAKEYSHCAWTIVRVEILRNFYFINRLTGYLRN

SEQ ID NO: 1239 - protein, 166 aa, Homo sapiens
MSYNLLGFLQRSSNFQCQKLLWQLNGRLEYCLKDRMNFDIPEEIKQLQQFQKEDAALTIYEMLQNIFAIFRQDSSSTGWNETIVENLLAEVYHQINHLKTVLEEKLEKEDFTRGKLMSSLHLKRYYGRILHYLKAKEYSHCAWTIVRVEILRNFYFINRLTGYLRN

SEQ ID NO: 1240 - protein, 166 aa, Homo sapiens
MSYNLLGFLQRSSNFQCQKLLWQLNGRLEYCLKDRMNFDIPEEIKQLQQFQKEDAALTIYEMLQNIFAIFRQDSSSTGWNETIVENLLAKVYHQINHLKTVLEEKLEKEDFTRGKLMSSLHLKRYYGRILHYLKAKEYSHCAWTIVRVEILRNFYFINRLTGYLRN

SEQ ID NO: 1241 - protein, 166 aa, Homo sapiens
MSYNLLGFLQRSSNFQCQKLLWQLNGRLEYCLKDRMNFDIPEEIKQLQQFQKEDAALTIYEMLQNIFAIFRQDSSSTGWNETIVENLLAQVYHQINHLKTVLEEKLEKEDFTRGKLMSSLHLKRYYGRILHYLKAKEYSHCAWTIVRVEILRNFYFINRLTGYLRN

SEQ ID NO: 1242 - protein, 166 aa, Homo sapiens
MSYNLLGFLQRSSNFQCQKLLWQLNGRLEYCLKDRMNFDIPEEIKQLQQFQKEDAALTIYEMLQNIFAIFRQDSSSTGWNETIVENLLARVYHQINHLKTVLEEKLEKEDFTRGKLMSSLHLKRYYGRILHYLKAKEYSHCAWTIVRVEILRNFYFINRLTGYLRN

SEQ ID NO: 1243 - protein, 166 aa, Homo sapiens
MSYNLLGFLQRSSNFQCQKLLWQLNGRLEYCLKDRMNFDIPEEIKQLQQFQKEDAALTIYEMLQNIFAIFRQDSSSTGWNETIVENLLASVYHQINHLKTVLEEKLEKEDFTRGKLMSSLHLKRYYGRILHYLKAKEYSHCAWTIVRVEILRNFYFINRLTGYLRN

SEQ ID NO: 1244 - protein, 166 aa, Homo sapiens
MSYNLLGFLQRSSNFQCQKLLWQLNGRLEYCLKDRMNFDIPEEIKQLQQFQKEDAALTIYEMLQNIFAIFRQDSSSTGWNETIVENLLATVYHQINHLKTVLEEKLEKEDFTRGKLMSSLHLKRYYGRILHYLKAKEYSHCAWTIVRVEILRNFYFINRLTGYLRN

SEQ ID NO: 1245 - protein, 166 aa, Homo sapiens
MSYNLLGFLQRSSNFQCQKLLWQLNGRLEYCLKDRMNFDIPEEIKQLQQFQKEDAALTIYEMLQNIFAIFRQDSSSTGWNETIVENLLANDYHQINHLKTVLEEKLEKEDFTRGKLMSSLHLKRYYGRILHYLKAKEYSHCAWTIVRVEILRNFYFINRLTGYLRN

SEQ ID NO: 1246 - protein, 166 aa, Homo sapiens
MSYNLLGFLQRSSNFQCQKLLWQLNGRLEYCLKDRMNFDIPEEIKQLQQFQKEDAALTIYEMLQNIFAIFRQDSSSTGWNETIVENLLANEYHQINHLKTVLEEKLEKEDFTRGKLMSSLHLKRYYGRILHYLKAKEYSHCAWTIVRVEILRNFYFINRLTGYLRN

SEQ ID NO: 1247 - protein, 166 aa, Homo sapiens
MSYNLLGFLQRSSNFQCQKLLWQLNGRLEYCLKDRMNFDIPEEIKQLQQFQKEDAALTIYEMLQNIFAIFRQDSSSTGWNETIVENLLANKYHQINHLKTVLEEKLEKEDFTRGKLMSSLHLKRYYGRILHYLKAKEYSHCAWTIVRVEILRNFYFINRLTGYLRN

SEQ ID NO: 1248 - protein, 166 aa, Homo sapiens
MSYNLLGFLQRSSNFQCQKLLWQLNGRLEYCLKDRMNFDIPEEIKQLQQFQKEDAALTIYEMLQNIFAIFRQDSSSTGWNETIVENLLANNYHQINHLKTVLEEKLEKEDFTRGKLMSSLHLKRYYGRILHYLKAKEYSHCAWTIVRVEILRNFYFINRLTGYLRN

SEQ ID NO: 1249 - protein, 166 aa, Homo sapiens
MSYNLLGFLQRSSNFQCQKLLWQLNGRLEYCLKDRMNFDIPEEIKQLQQFQKEDAALTIYEMLQNIFAIFRQDSSSTGWNETIVENLLANQYHQINHLKTVLEEKLEKEDFTRGKLMSSLHLKRYYGRILHYLKAKEYSHCAWTIVRVEILRNFYFINRLTGYLRN

SEQ ID NO: 1250 - protein, 166 aa, Homo sapiens
MSYNLLGFLQRSSNFQCQKLLWQLNGRLEYCLKDRMNFDIPEEIKQLQQFQKEDAALTIYEMLQNIFAIFRQDSSSTGWNETIVENLLANRYHQINHLKTVLEEKLEKEDFTRGKLMSSLHLKRYYGRILHYLKAKEYSHCAWTIVRVEILRNFYFINRLTGYLRN

SEQ ID NO: 1251 - protein, 166 aa, Homo sapiens
MSYNLLGFLQRSSNFQCQKLLWQLNGRLEYCLKDRMNFDIPEEIKQLQQFQKEDAALTIYEMLQNIFAIFRQDSSSTGWNETIVENLLANSYHQINHLKTVLEEKLEKEDFTRGKLMSSLHLKRYYGRILHYLKAKEYSHCAWTIVRVEILRNFYFINRLTGYLRN

SEQ ID NO: 1252 - protein, 166 aa, Homo sapiens
MSYNLLGFLQRSSNFQCQKLLWQLNGRLEYCLKDRMNFDIPEEIKQLQQFQKEDAALTIYEMLQNIFAIFRQDSSSTGWNETIVENLLANTYHQINHLKTVLEEKLEKEDFTRGKLMSSLHLKRYYGRILHYLKAKEYSHCAWTIVRVEILRNFYFINRLTGYLRN

SEQ ID NO: 1253 - protein, 166 aa, Homo sapiens
MSYNLLGFLQRSSNFQCQKLLWQLNGRLEYCLKDRMNFDIPEEIKQLQQFQKEDAALTIYEMLQNIFAIFRQDSSSTGWNETIVENLLANVYHDINHLKTVLEEKLEKEDFTRGKLMSSLHLKRYYGRILHYLKAKEYSHCAWTIVRVEILRNFYFINRLTGYLRN

SEQ ID NO: 1254 - protein, 166 aa, Homo sapiens
MSYNLLGFLQRSSNFQCQKLLWQLNGRLEYCLKDRMNFDIPEEIKQLQQFQKEDAALTIYEMLQNIFAIFRQDSSSTGWNETIVENLLANVYHEINHLKTVLEEKLEKEDFTRGKLMSSLHLKRYYGRILHYLKAKEYSHCAWTIVRVEILRNFYFINRLTGYLRN

SEQ ID NO: 1255 - protein, 166 aa, Homo sapiens
MSYNLLGFLQRSSNFQCQKLLWQLNGRLEYCLKDRMNFDIPEEIKQLQQFQKEDAALTIYEMLQNIFAIFRQDSSSTGWNETIVENLLANVYHKINHLKTVLEEKLEKEDFTRGKLMSSLHLKRYYGRILHYLKAKEYSHCAWTIVRVEILRNFYFINRLTGYLRN

SEQ ID NO: 1256 - protein, 166 aa, Homo sapiens
MSYNLLGFLQRSSNFQCQKLLWQLNGRLEYCLKDRMNFDIPEEIKQLQQFQKEDAALTIYEMLQNIFAIFRQDSSSTGWNETIVENLLANVYHNINHLKTVLEEKLEKEDFTRGKLMSSLHLKRYYGRILHYLKAKEYSHCAWTIVRVEILRNFYFINRLTGYLRN

SEQ ID NO: 1257 - protein, 166 aa, Homo sapiens
MSYNLLGFLQRSSNFQCQKLLWQLNGRLEYCLKDRMNFDIPEEIKQLQQFQKEDAALTIYEMLQNIFAIFRQDSSSTGWNETIVENLLANVYHRINHLKTVLEEKLEKEDFTRGKLMSSLHLKRYYGRILHYLKAKEYSHCAWTIVRVEILRNFYFINRLTGYLRN

SEQ ID NO: 1258 - protein, 166 aa, Homo sapiens
MSYNLLGFLQRSSNFQCQKLLWQLNGRLEYCLKDRMNFDIPEEIKQLQQFQKEDAALTIYEMLQNIFAIFRQDSSSTGWNETIVENLLANVYHSINHLKTVLEEKLEKEDFTRGKLMSSLHLKRYYGRILHYLKAKEYSHCAWTIVRVEILRNFYFINRLTGYLRN

SEQ ID NO: 1259 - protein, 166 aa, Homo sapiens
MSYNLLGFLQRSSNFQCQKLLWQLNGRLEYCLKDRMNFDIPEEIKQLQQFQKEDAALTIYEMLQNIFAIFRQDSSSTGWNETIVENLLANVYHTINHLKTVLEEKLEKEDFTRGKLMSSLHLKRYYGRILHYLKAKEYSHCAWTIVRVEILRNFYFINRLTGYLRN

SEQ ID NO: 1260 - protein, 166 aa, Homo sapiens
MSYNLLGFLQRSSNFQCQKLLWQLNGRLEYCLKDRMNFDIPEEIKQLQQFQKEDAALTIYEMLQNIFAIFRQDSSSTGWNETIVENLLANVYHQDNHLKTVLEEKLEKEDFTRGKLMSSLHLKRYYGRILHYLKAKEYSHCAWTIVRVEILRNFYFINRLTGYLRN

SEQ ID NO: 1261 - protein, 166 aa, Homo sapiens
MSYNLLGFLQRSSNFQCQKLLWQLNGRLEYCLKDRMNFDIPEEIKQLQQFQKEDAALTIYEMLQNIFAIFRQDSSSTGWNETIVENLLANVYHQENHLKTVLEEKLEKEDFTRGKLMSSLHLKRYYGRILHYLKAKEYSHCAWTIVRVEILRNFYFINRLTGYLRN

SEQ ID NO: 1262 - protein, 166 aa, Homo sapiens
MSYNLLGFLQRSSNFQCQKLLWQLNGRLEYCLKDRMNFDIPEEIKQLQQFQKEDAALTIYEMLQNIFAIFRQDSSSTGWNETIVENLLANVYHQKNHLKTVLEEKLEKEDFTRGKLMSSLHLKRYYGRILHYLKAKEYSHCAWTIVRVEILRNFYFINRLTGYLRN

SEQ ID NO: 1263 - protein, 166 aa, Homo sapiens
MSYNLLGFLQRSSNFQCQKLLWQLNGRLEYCLKDRMNFDIPEEIKQLQQFQKEDAALTIYEMLQNIFAIFRQDSSSTGWNETIVENLLANVYHQNNHLKTVLEEKLEKEDFTRGKLMSSLHLKRYYGRILHYLKAKEYSHCAWTIVRVEILRNFYFINRLTGYLRN

SEQ ID NO: 1264 - protein, 166 aa, Homo sapiens
MSYNLLGFLQRSSNFQCQKLLWQLNGRLEYCLKDRMNFDIPEEIKQLQQFQKEDAALTIYEMLQNIFAIFRQDSSSTGWNETIVENLLANVYHQQNHLKTVLEEKLEKEDFTRGKLMSSLHLKRYYGRILHYLKAKEYSHCAWTIVRVEILRNFYFINRLTGYLRN

SEQ ID NO: 1265 - protein, 166 aa, Homo sapiens
MSYNLLGFLQRSSNFQCQKLLWQLNGRLEYCLKDRMNFDIPEEIKQLQQFQKEDAALTIYEMLQNIFAIFRQDSSSTGWNETIVENLLANVYHQRNHLKTVLEEKLEKEDFTRGKLMSSLHLKRYYGRILHYLKAKEYSHCAWTIVRVEILRNFYFINRLTGYLRN

SEQ ID NO: 1266 - protein, 166 aa, Homo sapiens
MSYNLLGFLQRSSNFQCQKLLWQLNGRLEYCLKDRMNFDIPEEIKQLQQFQKEDAALTIYEMLQNIFAIFRQDSSSTGWNETIVENLLANVYHQSNHLKTVLEEKLEKEDFTRGKLMSSLHLKRYYGRILHYLKAKEYSHCAWTIVRVEILRNFYFINRLTGYLRN

SEQ ID NO: 1267 - protein, 166 aa, Homo sapiens
MSYNLLGFLQRSSNFQCQKLLWQLNGRLEYCLKDRMNFDIPEEIKQLQQFQKEDAALTIYEMLQNIFAIFRQDSSSTGWNETIVENLLANVYHQTNHLKTVLEEKLEKEDFTRGKLMSSLHLKRYYGRILHYLKAKEYSHCAWTIVRVEILRNFYFINRLTGYLRN

SEQ ID NO: 1268 - protein, 166 aa, Homo sapiens
MSYNLLGFLQRSSNFQCQKLLWQLNGRLEYCLKDRMNFDIPEEIKQLQQFQKEDAALTIYEMLQNIFAIFRQDSSSTGWNETIVENLLANVYHQINDLKTVLEEKLEKEDFTRGKLMSSLHLKRYYGRILHYLKAKEYSHCAWTIVRVEILRNFYFINRLTGYLRN

SEQ ID NO: 1269 - protein, 166 aa, Homo sapiens
MSYNLLGFLQRSSNFQCQKLLWQLNGRLEYCLKDRMNFDIPEEIKQLQQFQKEDAALTIYEMLQNIFAIFRQDSSSTGWNETIVENLLANVYHQINELKTVLEEKLEKEDFTRGKLMSSLHLKRYYGRILHYLKAKEYSHCAWTIVRVEILRNFYFINRLTGYLRN

SEQ ID NO: 1270 - protein, 166 aa, Homo sapiens
MSYNLLGFLQRSSNFQCQKLLWQLNGRLEYCLKDRMNFDIPEEIKQLQQFQKEDAALTIYEMLQNIFAIFRQDSSSTGWNETIVENLLANVYHQINKLKTVLEEKLEKEDFTRGKLMSSLHLKRYYGRILHYLKAKEYSHCAWTIVRVEILRNFYFINRLTGYLRN

SEQ ID NO: 1271 - protein, 166 aa, Homo sapiens
MSYNLLGFLQRSSNFQCQKLLWQLNGRLEYCLKDRMNFDIPEEIKQLQQFQKEDAALTIYEMLQNIFAIFRQDSSSTGWNETIVENLLANVYHQINNLKTVLEEKLEKEDFTRGKLMSSLHLKRYYGRILHYLKAKEYSHCAWTIVRVEILRNFYFINRLTGYLRN

SEQ ID NO: 1272 - protein, 166 aa, Homo sapiens
MSYNLLGFLQRSSNFQCQKLLWQLNGRLEYCLKDRMNFDIPEEIKQLQQFQKEDAALTIYEMLQNIFAIFRQDSSSTGWNETIVENLLANVYHQINQLKTVLEEKLEKEDFTRGKLMSSLHLKRYYGRILHYLKAKEYSHCAWTIVRVEILRNFYFINRLTGYLRN

SEQ ID NO: 1273 - protein, 166 aa, Homo sapiens
MSYNLLGFLQRSSNFQCQKLLWQLNGRLEYCLKDRMNFDIPEEIKQLQQFQKEDAALTIYEMLQNIFAIFRQDSSSTGWNETIVENLLANVYHQINRLKTVLEEKLEKEDFTRGKLMSSLHLKRYYGRILHYLKAKEYSHCAWTIVRVEILRNFYFINRLTGYLRN

SEQ ID NO: 1274 - protein, 166 aa, Homo sapiens
MSYNLLGFLQRSSNFQCQKLLWQLNGRLEYCLKDRMNFDIPEEIKQLQQFQKEDAALTIYEMLQNIFAIFRQDSSSTGWNETIVENLLANVYHQINSLKTVLEEKLEKEDFTRGKLMSSLHLKRYYGRILHYLKAKEYSHCAWTIVRVEILRNFYFINRLTGYLRN

SEQ ID NO: 1275 - protein, 166 aa, Homo sapiens
MSYNLLGFLQRSSNFQCQKLLWQLNGRLEYCLKDRMNFDIPEEIKQLQQFQKEDAALTIYEMLQNIFAIFRQDSSSTGWNETIVENLLANVYHQINTLKTVLEEKLEKEDFTRGKLMSSLHLKRYYGRILHYLKAKEYSHCAWTIVRVEILRNFYFINRLTGYLRN

SEQ ID NO: 1276 - protein, 166 aa, Homo sapiens
MSYNLLGFLQRSSNFQCQKLLWQLNGRLEYCLKDRMNFDIPEEIKQLQQFQKEDAALTIYEMLQNIFAIFRQDSSSTGWNETIVENLLANVYHQINHDKTVLEEKLEKEDFTRGKLMSSLHLKRYYGRILHYLKAKEYSHCAWTIVRVEILRNFYFINRLTGYLRN

SEQ ID NO: 1277 - protein, 166 aa, Homo sapiens
MSYNLLGFLQRSSNFQCQKLLWQLNGRLEYCLKDRMNFDIPEEIKQLQQFQKEDAALTIYEMLQNIFAIFRQDSSSTGWNETIVENLLANVYHQINHEKTVLEEKLEKEDFTRGKLMSSLHLKRYYGRILHYLKAKEYSHCAWTIVRVEILRNFYFINRLTGYLRN

SEQ ID NO: 1278 - protein, 166 aa, Homo sapiens
MSYNLLGFLQRSSNFQCQKLLWQLNGRLEYCLKDRMNFDIPEEIKQLQQFQKEDAALTIYEMLQNIFAIFRQDSSSTGWNETIVENLLANVYHQINHKKTVLEEKLEKEDFTRGKLMSSLHLKRYYGRILHYLKAKEYSHCAWTIVRVEILRNFYFINRLTGYLRN

SEQ ID NO: 1279 - protein, 166 aa, Homo sapiens
MSYNLLGFLQRSSNFQCQKLLWQLNGRLEYCLKDRMNFDIPEEIKQLQQFQKEDAALTIYEMLQNIFAIFRQDSSSTGWNETIVENLLANVYHQINHNKTVLEEKLEKEDFTRGKLMSSLHLKRYYGRILHYLKAKEYSHCAWTIVRVEILRNFYFINRLTGYLRN

SEQ ID NO: 1280 - protein, 166 aa, Homo sapiens
MSYNLLGFLQRSSNFQCQKLLWQLNGRLEYCLKDRMNFDIPEEIKQLQQFQKEDAALTIYEMLQNIFAIFRQDSSSTGWNETIVENLLANVYHQINHQKTVLEEKLEKEDFTRGKLMSSLHLKRYYGRILHYLKAKEYSHCAWTIVRVEILRNFYFINRLTGYLRN

SEQ ID NO: 1281 - protein, 166 aa, Homo sapiens
MSYNLLGFLQRSSNFQCQKLLWQLNGRLEYCLKDRMNFDIPEEIKQLQQFQKEDAALTIYEMLQNIFAIFRQDSSSTGWNETIVENLLANVYHQINHRKTVLEEKLEKEDFTRGKLMSSLHLKRYYGRILHYLKAKEYSHCAWTIVRVEILRNFYFINRLTGYLRN

SEQ ID NO: 1282 - protein, 166 aa, Homo sapiens
MSYNLLGFLQRSSNFQCQKLLWQLNGRLEYCLKDRMNFDIPEEIKQLQQFQKEDAALTIYEMLQNIFAIFRQDSSSTGWNETIVENLLANVYHQINHSKTVLEEKLEKEDFTRGKLMSSLHLKRYYGRILHYLKAKEYSHCAWTIVRVEILRNFYFINRLTGYLRN

SEQ ID NO: 1283 - protein, 166 aa, Homo sapiens
MSYNLLGFLQRSSNFQCQKLLWQLNGRLEYCLKDRMNFDIPEEIKQLQQFQKEDAALTIYEMLQNIFAIFRQDSSSTGWNETIVENLLANVYHQINHTKTVLEEKLEKEDFTRGKLMSSLHLKRYYGRILHYLKAKEYSHCAWTIVRVEILRNFYFINRLTGYLRN

SEQ ID NO: 1284 - protein, 166 aa, Homo sapiens
MSYNLLGFLQRSSNFQCQKLLWQLNGRLEYCLKDRMNFDIPEEIKQLQQFQKEDAALTIYEMLQNIFAIFRQDSSSTGWNETIVENLLANVYHQINHLKTDLEEKLEKEDFTRGKLMSSLHLKRYYGRILHYLKAKEYSHCAWTIVRVEILRNFYFINRLTGYLRN

SEQ ID NO: 1285 - protein, 166 aa, Homo sapiens
MSYNLLGFLQRSSNFQCQKLLWQLNGRLEYCLKDRMNFDIPEEIKQLQQFQKEDAALTIYEMLQNIFAIFRQDSSSTGWNETIVENLLANVYHQINHLKTELEEKLEKEDFTRGKLMSSLHLKRYYGRILHYLKAKEYSHCAWTIVRVEILRNFYFINRLTGYLRN

SEQ ID NO: 1286 - protein, 166 aa, Homo sapiens
MSYNLLGFLQRSSNFQCQKLLWQLNGRLEYCLKDRMNFDIPEEIKQLQQFQKEDAALTIYEMLQNIFAIFRQDSSSTGWNETIVENLLANVYHQINHLKTKLEEKLEKEDFTRGKLMSSLHLKRYYGRILHYLKAKEYSHCAWTIVRVEILRNFYFINRLTGYLRN

SEQ ID NO: 1287 - protein, 166 aa, Homo sapiens
MSYNLLGFLQRSSNFQCQKLLWQLNGRLEYCLKDRMNFDIPEEIKQLQQFQKEDAALTIYEMLQNIFAIFRQDSSSTGWNETIVENLLANVYHQINHLKTNLEEKLEKEDFTRGKLMSSLHLKRYYGRILHYLKAKEYSHCAWTIVRVEILRNFYFINRLTGYLRN

SEQ ID NO: 1288 - protein, 166 aa, Homo sapiens
MSYNLLGFLQRSSNFQCQKLLWQLNGRLEYCLKDRMNFDIPEEIKQLQQFQKEDAALTIYEMLQNIFAIFRQDSSSTGWNETIVENLLANVYHQINHLKTQLEEKLEKEDFTRGKLMSSLHLKRYYGRILHYLKAKEYSHCAWTIVRVEILRNFYFINRLTGYLRN

SEQ ID NO: 1289 - protein, 166 aa, Homo sapiens
MSYNLLGFLQRSSNFQCQKLLWQLNGRLEYCLKDRMNFDIPEEIKQLQQFQKEDAALTIYEMLQNIFAIFRQDSSSTGWNETIVENLLANVYHQINHLKTRLEEKLEKEDFTRGKLMSSLHLKRYYGRILHYLKAKEYSHCAWTIVRVEILRNFYFINRLTGYLRN

SEQ ID NO: 1290 - protein, 166 aa, Homo sapiens
MSYNLLGFLQRSSNFQCQKLLWQLNGRLEYCLKDRMNFDIPEEIKQLQQFQKEDAALTIYEMLQNIFAIFRQDSSSTGWNETIVENLLANVYHQINHLKTSLEEKLEKEDFTRGKLMSSLHLKRYYGRILHYLKAKEYSHCAWTIVRVEILRNFYFINRLTGYLRN

SEQ ID NO: 1291 - protein, 166 aa, Homo sapiens
MSYNLLGFLQRSSNFQCQKLLWQLNGRLEYCLKDRMNFDIPEEIKQLQQFQKEDAALTIYEMLQNIFAIFRQDSSSTGWNETIVENLLANVYHQINHLKTTLEEKLEKEDFTRGKLMSSLHLKRYYGRILHYLKAKEYSHCAWTIVRVEILRNFYFINRLTGYLRN

SEQ ID NO: 1292 - protein, 166 aa, Homo sapiens
CSYNLLGFLQRSSNFQCQKLLWQLNGRLEYCLKDRMNFDIPEEIKQLQQFQKEDAALTIYEMLQNIFAIFRQDSSSTGWNETIVENLLANVYHQINHLKTVLEEKLEKEDFTRGKLMSSLHLKRYYGRILHYLKAKEYSHCAWTIVRVEILRNFYFINRLTGYLRN

SEQ ID NO: 1293 - protein, 166 aa, Homo sapiens
MSYNLLGFLQRSSNFQCQKLLWQLNGRLEYCLKDRMNFDIPEEIKQLQQFQKEDAALTIYEMLQNIFAIFRQDSSSTGWNETIVENLLANVYHQINHLKTCLEEKLEKEDFTRGKLMSSLHLKRYYGRILHYLKAKEYSHCAWTIVRVEILRNFYFINRLTGYLRN

SEQ ID NO: 1294 - protein, 166 aa, Homo sapiens
MSYNLCGFLQRSSNFQCQKLLWQLNGRLEYCLKDRMNFDIPEEIKQLQQFQKEDAALTIYEMLQNIFAIFRQDSSSTGWNETIVENLLANVYHQINHLKTVLEEKLEKEDFTRGKLMSSLHLKRYYGRILHYLKAKEYSHCAWTIVRVEILRNFYFINRLTGYLRN

SEQ ID NO: 1295 - protein, 166 aa, Homo sapiens
MSYNLLGFLQRSSNFQCQKLLWQLNGRLEYCLKDRMNFDIPEEIKQLQQFQKEDAALTIYEMLQNIFAIFRQDSSSTGWNETIVENLLANVYHQINHCKTVLEEKLEKEDFTRGKLMSSLHLKRYYGRILHYLKAKEYSHCAWTIVRVEILRNFYFINRLTGYLRN

SEQ ID NO: 1296 - protein, 166 aa, Homo sapiens
MSYNLLGFLCRSSNFQCQKLLWQLNGRLEYCLKDRMNFDIPEEIKQLQQFQKEDAALTIYEMLQNIFAIFRQDSSSTGWNETIVENLLANVYHQINHLKTVLEEKLEKEDFTRGKLMSSLHLKRYYGRILHYLKAKEYSHCAWTIVRVEILRNFYFINRLTGYLRN

SEQ ID NO: 1297 - protein, 166 aa, Homo sapiens
MSYNLLGFLQRSSNFQCQKLLWQLNGRLEYCLKDRMNFDIPEEIKQLQQFQKEDAALTIYEMLQNIFAIFRQDSSSTGWNETIVENLLANVYHQINCLKTVLEEKLEKEDFTRGKLMSSLHLKRYYGRILHYLKAKEYSHCAWTIVRVEILRNFYFINRLTGYLRN

SEQ ID NO: 1298 - protein, 166 aa, Homo sapiens
MSYNLLGFLQRSCNFQCQKLLWQLNGRLEYCLKDRMNFDIPEEIKQLQQFQKEDAALTIYEMLQNIFAIFRQDSSSTGWNETIVENLLANVYHQINHLKTVLEEKLEKEDFTRGKLMSSLHLKRYYGRILHYLKAKEYSHCAWTIVRVEILRNFYFINRLTGYLRN

SEQ ID NO: 1299 - protein, 166 aa, Homo sapiens
MSYNLLGFLQRSSNFQCQKLLWQLNGRLEYCLKDRMNFDIPEEIKQLQQFQKEDAALTIYEMLQNIFAIFRQDSSSTGWNETIVENLLANVYHCINHLKTVLEEKLEKEDFTRGKLMSSLHLKRYYGRILHYLKAKEYSHCAWTIVRVEILRNFYFINRLTGYLRN

SEQ ID NO: 1300 - protein, 166 aa, Homo sapiens
MSYNLLGFLQRSSNFCCQKLLWQLNGRLEYCLKDRMNFDIPEEIKQLQQFQKEDAALTIYEMLQNIFAIFRQDSSSTGWNETIVENLLANVYHQINHLKTVLEEKLEKEDFTRGKLMSSLHLKRYYGRILHYLKAKEYSHCAWTIVRVEILRNFYFINRLTGYLRN

SEQ ID NO: 1301 - protein, 166 aa, Homo sapiens
MSYNLLGFLQRSSNFQCQKLLWQLNGRLEYCLKDRMNFDIPEEIKQLQQFQKEDAALTIYEMLQNIFAIFRQDSSSTGWNETIVENLLACVYHQINHLKTVLEEKLEKEDFTRGKLMSSLHLKRYYGRILHYLKAKEYSHCAWTIVRVEILRNFYFINRLTGYLRN

SEQ ID NO: 1302 - protein, 166 aa, Homo sapiens
MSYNLLGFLQRSSNFQCQKLLWQLNGRLEYCLKDRMNFDIPEEIKQLQQFQKEDAALTIYEMLQNIFAIFRQDSSSTGWNETIVENLLANCYHQINHLKTVLEEKLEKEDFTRGKLMSSLHLKRYYGRILHYLKAKEYSHCAWTIVRVEILRNFYFINRLTGYLRN

SEQ ID NO: 1303 - protein, 165 aa, Homo sapiens
CDLPQTHSLGSRRTLMLLAQMRRISLFSCLKDRHDFGFPQEEFGNQFQKAETIPVLHEMIQQIFNLFSTKDSSAAWDETLLDKFYTELHQQLNDLEACVIQGVGVTETPLMKEDSILAVRKYFQRITLYLKEKKYSPCAWEVVRAEIMRSFSLSTNLQESLRSKE

SEQ ID NO: 1304 - protein, 10 aa, Artificial Sequence
  epitope tag
CYPYDVPDYA

SEQ ID NO: 1305 - protein, 8 aa, Artificial Sequence
  epitope tag
DYKDDDDK

SEQ ID NO: 1306 - protein, 11 aa, Artificial Sequence
  epitope tag
CEQKLISEEDL

SEQ ID NO: 1307 - protein, 5 aa, Artificial Sequence
  proteolytic cleavage site
DDDDK

SEQ ID NO: 1308 - protein, 4 aa, Artificial Sequence
  proteolytic cleavage site
IEGR

SEQ ID NO: 1309 - protein, 6 aa, Artificial Sequence
  proteolytic cleavage site
LVPRGS

SEQ ID NO: 1310 - protein, 8 aa, Artificial Sequence
  proteolytic cleavage site
HPFHLVIH

SEQ ID NO: 1311 - protein, 23 aa, Artificial Sequence
  peptide carrier
NYHDIVLALAGVCQSAKLVHQLA

SEQ ID NO: 1312 - protein, 23 aa, Artificial Sequence
  peptide carrier
NYYDITLALAGVCQAAKLVQQFA

SEQ ID NO: 1313 - protein, 23 aa, Artificial Sequence
  peptide carrier
NYYDITLALAGICQSARLVQQLA

SEQ ID NO: 1314 - protein, 23 aa, Artificial Sequence
  peptide carrier
AIYDRTIAFAGICQAVALVQQVA

SEQ ID NO: 1315 - protein, 23 aa, Artificial Sequence
  peptide carrier
KIHLITLSLAGICQSAHLVQQLA

SEQ ID NO: 1316 - protein, 23 aa, Artificial Sequence
  peptide carrier
DPRQQLIALGAVFESAALVDKLA

SEQ ID NO: 1317 - protein, 23 aa, Artificial Sequence
  peptide carrier
LIDNRVLALAGVVQALQQVRQIA

SEQ ID NO: 1318 - protein, 23 aa, Artificial Sequence
  peptide carrier
NLPPIVLAVIGICAAVFLLQQYV

SEQ ID NO: 1319 - protein, 23 aa, Artificial Sequence
  peptide carrier
NYFIVNLALADLCMAAFNAAFNF

SEQ ID NO: 1320 - protein, 23 aa, Artificial Sequence
  peptide carrier
TAFDFNKMLDGVCTYVKGVQQYL

SEQ ID NO: 1321 - protein, 23 aa, Artificial Sequence
  peptide carrier
RAILIPLALAGLCQVARAGDISS

SEQ ID NO: 1322 - protein, 25 aa, Artificial Sequence
  peptide carrier
MRNLTKTSLLLAGLCTAAQMVFVTH

SEQ ID NO: 1323 - protein, 25 aa, Artificial Sequence
  peptide carrier
IELMIVIAIIGILAAIALPAYQEYV

SEQ ID NO: 1324 - protein, 25 aa, Artificial Sequence
  peptide carrier
IELMIVIAIIGILAAIALPAYQDYV

SEQ ID NO: 1325 - protein, 16 aa, Artificial Sequence
  peptide carrier
ASFGFCIGRLCVQDGF

SEQ ID NO: 1326 - protein, 23 aa, Artificial Sequence
  peptide carrier
NYFLVNLAFAEASMAAFNTVVNF

SEQ ID NO: 1327 - protein, 24 aa, Artificial Sequence
  peptide carrier
MNYYDITLALAGICQSARLVQQLA

SEQ ID NO: 1328 - protein, 23 aa, Artificial Sequence
  peptide carrier
MYYDITLALAGICQSARLVQQLA

SEQ ID NO: 1329 - protein, 22 aa, Artificial Sequence
  peptide carrier
MYDITLALAGICQSARLVQQLA

SEQ ID NO: 1330 - protein, 23 aa, Artificial Sequence
  peptide carrier
MRNLTRTSLLLAGLCTAAQMVFV

SEQ ID NO: 1331 - protein, 23 aa, Artificial Sequence
  peptide carrier
NYHDIVLALAGVCQSARLVHQLA

SEQ ID NO: 1332 - protein, 6 aa, Artificial Sequence
  linker
AAAGGM

SEQ ID NO: 1333 - protein, 14 aa, Artificial Sequence
  linker
AAAGGMPPAAAGGM

SEQ ID NO: 1334 - protein, 6 aa, Artificial Sequence
  linker
AAAGGM

SEQ ID NO: 1335 - protein, 9 aa, Artificial Sequence
  linker
PPAAAGGMM

SEQ ID NO: 1336 - protein, 4 aa, Artificial Sequence
  linker
IEGR

SEQ ID NO: 1337 - protein, 6 aa, Artificial Sequence
  linker
GGKGGK

SEQ ID NO: 1338 - DNA, 92 bp, Artificial Sequence
  primer
agcttgccaccatgtgcgacctgccccagacccacagcctgggcaaccgccgcgccctgatcctgctggcccagatgcgccgcatcagcccc

SEQ ID NO: 1339 - DNA, 79 bp, Artificial Sequence
  primer
gcggcgcatctgggccagcaggatcagggcgcggcggttgcccaggctgtgggtctggggcaggtcgcacatggtggca

SEQ ID NO: 1340 - DNA, 88 bp, Artificial Sequence
  primer
ttcagctgcctgaaggaccgccacgacttcggcttcccccaggaggagttcgacggcaaccagttccagaaggcccaggccatcagcg

SEQ ID NO: 1341 - DNA, 88 bp, Artificial Sequence
  primer
cctgggccttctggaactggttgccgtcgaactcctcctgggggaagccgaagtcgtggcggtccttcaggcagctgaaggggctgat

SEQ ID NO: 1342 - DNA, 86 bp, Artificial Sequence
  primer
tgctgcacgagatgatccagcagaccttcaacctgttcagcaccaaggacagcagcgccgcctgggacgagagcctgctggagaag

SEQ ID NO: 1343 - DNA, 85 bp, Artificial Sequence
  primer
aggctctcgtcccaggcggcgctgctgtccttggtgctgaacaggttgaaggtctgctggatcatctcgtgcagcacgctgatgg

SEQ ID NO: 1344 - DNA, 91 bp, Artificial Sequence
  primer
ttctacaccgagctgtaccagcagctgaacgacctggaggcctgcgtgatccaggaggtgggcgtggaggagacccccctgatgaacgtgg

SEQ ID NO: 1345 - DNA, 92 bp, Artificial Sequence
  primer
tcaggggggtctcctccacgcccacctcctggatcacgcaggcctccaggtcgttcagctgctggtacagctcggtgtagaacttctccagc

SEQ ID NO: 1346 - DNA, 87 bp, Artificial Sequence
  primer
acagcatcctggccgtgaagaagtacttccagcgcatcaccctgtacctgaccgagaagaagtacagcccctgcgcctgggaggtgg

SEQ ID NO: 1347 - DNA, 87 bp, Artificial Sequence
  primer
aggcgcaggggctgtacttcttctcggtcaggtacagggtgatgcgctggaagtacttcttcacggccaggatgctgtccacgttca

SEQ ID NO: 1348 - DNA, 75 bp, Artificial Sequence
  primer
tgcgcgccgagatcatgcgcagcttcagcctgagcaccaacctgcaggagcgcctgcgccgcaaggagtaatgag

SEQ ID NO: 1349 - DNA, 88 bp, Artificial Sequence
  primer
aattctcattactccttgcggcgcaggcgctcctgcaggttggtgctcaggctgaagctgcgcatgatctcggcgcgcaccacctccc

SEQ ID NO: 1350 - DNA, 66 bp, Artificial Sequence
  primer
gccctggtggtgctgagctgcaagagcagctgcagcctgggctgcgacctgccccagacccacagc

SEQ ID NO: 1351 - DNA, 67 bp, Artificial Sequence
  primer
tataaagcttgccaccatggccctgcccttcgccctgatgatggccctggtggtgctgagctgcaag

SEQ ID NO: 1352 - DNA, 66 bp, Artificial Sequence
  primer
gccctgctgctgtgcttcagcaccaccgccctgagcatgagctgcgacctgccccagacccacagc

SEQ ID NO: 1353 - DNA, 67 bp, Artificial Sequence
  primer
tataaagcttgccaccatgaccaacaagtgcctgctgcagatcgccctgctgctgtgcttcagcacc

SEQ ID NO: 1354 - DNA, 34 bp, Artificial Sequence
  primer
tatagaattctcattactccttgcggcgcaggcg

What is claimed is:

1. An oral pharmaceutical composition comprising:
(a) a first number of moles of a known protease-resistant or protease-resistant, hyperglycosylated polypeptide variant of a parent protein therapeutic in a first unit form, the known protease-resistant or protease-resistant, hyperglycosylated polypeptide variant comprising at least one mutated protease cleavage site in place of a native protease cleavage site found in the parent protein therapeutic, and further comprising: i) a carbohydrate moiety covalently attached to at least one non-native glycosylation site that is not present in the parent protein therapeutic; or ii) a carbohydrate moiety covalently attached to at least one native glycosylation site that is present but is not glycosylated in the parent protein therapeutic; and
(b) a pharmaceutical excipient suitable for oral delivery,
wherein the first number of moles of the known protease-resistant or protease-resistant, hyperglycosylated polypeptide variant in the first unit form is greater than a second number of moles of the parent protein therapeutic in a parenteral pharmaceutical composition, wherein the parenteral pharmaceutical composition is an immediate release formulation suitable for subcutaneous bolus injection;
wherein the parent protein therapeutic is proven to be effective in the treatment of a disease in a patient when administered to the patient by subcutaneous bolus injection of an amount of the parenteral pharmaceutical composition whereby the patient receives the second number of moles of the parent protein therapeutic at a selected dosing interval; and
wherein, upon oral administration of the first unit form to a patient, the time required for release of the first number of moles of the known protease-resistant or protease-resistant, hyperglycosylated polypeptide variant is no more than the time between doses in the selected dosing interval.

2. An oral pharmaceutical composition comprising:
(a) a first dose of a known protease-resistant or protease-resistant, hyperglycosylated polypeptide variant of a parent protein therapeutic in a first unit form, the known protease-resistant or protease-resistant, hyperglycosylated polypeptide variant comprising at least one mutated protease cleavage site in place of a native protease cleavage site found in the parent protein therapeutic, and further comprising: i) a carbohydrate moiety covalently attached to at least one non-native glycosylation site that is not present in the parent protein therapeutic; or ii) a carbohydrate moiety covalently attached to at least one native glycosylation site that is present but is not glycosylated in the parent protein therapeutic; and
(b) a pharmaceutical excipient suitable for oral delivery,
wherein the parent protein therapeutic is proven to be effective in the treatment of a disease in a patient when administered to the patient by subcutaneous bolus injection of a second dose of the parent protein therapeutic at a selected dosing interval;
wherein the amount of the known protease-resistant or protease-resistant, hyperglycosylated polypeptide variant in moles of drug per kilogram of patient body weight in the first dose is greater than the amount of parent protein therapeutic in moles of drug per kilogram of patient body weight in the second dose when the first and second doses are calculated for the average patient body weight in the total population of patients suffering from the disease; and
wherein, upon oral administration of the first dose in the first unit form to a patient, the time required for release of all of the known protease-resistant or protease-resistant, hyperglycosylated polypeptide variant in the first dose is no greater than the time between doses in the selected dosing interval.

3. An oral pharmaceutical composition comprising:
(a) a first number of moles of a known hyperglycosylated polypeptide variant of a parent protein therapeutic in a first unit form, the known hyperglycosylated polypeptide variant comprising: i) a carbohydrate moiety covalently attached to at least one non-native glycosylation site that is not present in the parent protein therapeutic; or ii) a carbohydrate moiety covalently attached to at least one native glycosylation site that is present but is not glycosylated in the parent protein therapeutic; and
(b) a pharmaceutical excipient suitable for oral delivery,
wherein the first number of moles of the known hyperglycosylated polypeptide variant in the first unit form is greater than a second number of moles of the parent protein therapeutic in a parenteral pharmaceutical composition, wherein the parenteral pharmaceutical composition is an immediate release formulation suitable for subcutaneous bolus injection;
wherein the parent protein therapeutic is proven to be effective in the treatment of a disease in a patient when administered to the patient by subcutaneous bolus injection of an amount of the parenteral pharmaceutical composition whereby the patient receives the second number of moles of the parent protein therapeutic at a selected dosing interval; and
wherein, upon oral administration of the first unit form to a patient, the time required for release of the first number of moles of the known protease-resistant or protease-resistant, hyperglycosylated polypeptide variant is no more than the time between doses in the selected dosing interval.

4. An oral pharmaceutical composition comprising:
(a) a first dose of a known hyperglycosylated polypeptide variant of a parent protein therapeutic in a first unit form, the known hyperglycosylated polypeptide variant comprising: i) a carbohydrate moiety covalently attached to at least one non-native glycosylation site that is not present in the parent protein therapeutic; or ii) a carbohydrate moiety covalently attached to at least one native glycosylation site that is present but is not glycosylated in the parent protein therapeutic; and
(b) a pharmaceutical excipient suitable for oral delivery,
wherein the parent protein therapeutic is proven to be effective in the treatment of a disease in a patient when administered to the patient by subcutaneous bolus injection of a second dose of the parent protein therapeutic at a selected dosing interval;
wherein the amount of the known hyperglycosylated polypeptide variant in moles of drug per kilogram of patient body weight in the first dose is greater than the amount of parent protein therapeutic in moles of drug per kilogram of patient body weight in the second dose when the first and second doses are calculated for the average patient body weight in the total population of patients suffering from the disease; and
wherein, upon oral administration of the first dose in the first unit form to a patient, the time required for release of all of the known hyperglycosylated polypeptide variant in the first dose is no greater than the time between doses in the selected dosing interval.

5. The composition of claim 2 or 4, wherein the second dose is a fixed dose.

6. The composition of claim 2 or 4, wherein the second dose is a weight-based dose.

7. The composition of claim 2 or 4, wherein the second dose is a stratified dose.

8. The composition of any of claims 1-7, wherein the at least one non-native glycosylation site is an N-linked glycosylation site.

9. The composition of any of claims 1-7, wherein the at least one non-native glycosylation site is an O-linked glycosylation site.

10. The composition of any of claims 1-7, wherein the known protease-resistant or hypergylcosylated or protease-resistant, hyperglycosylated polypeptide variant comprises two non-native glycosylation sites not found in the parent protein therapeutic.

11. The composition of claim 10, wherein the known protease-resistant or hyperglycosylated or protease-resistant, hyperglycosylated polypeptide variant comprises a carbohydrate moiety covalently attached to the non-native glycosylation sites.

12. The composition of any of claims 1-11, wherein the known protease-resistant or protease-resistant, hyperglycosylated polypeptide variant is a known protease-resistant or protease-resistant, hyperglycosylated variant of a parent IFN-α.

13. The composition of claim 12, wherein the parent IFN-α is an IFN-α2.

14. The composition of claim 13, wherein the known protease-resistant or protease-resistant, hyperglycosylated polypeptide variant is selected from [D99N] IFN-α2a, [D99N, D105N] IFN-α2a, [D99N] IFN-α2b, and [D99N, D105N] IFN-α2b glycopeptides, and wherein the variant comprises one or more amino acid replacements at any of amino acid positions 41, 58, 78, 107, 117, 125, 133 and 159, such that the variant comprises at least one mutated protease cleavage site in place of a native protease cleavage site found in the parent IFN-α2 polypeptide.

15. The composition of claim 12, wherein the parent IFN-α is a consensus IFN-α.

16. The composition of claim 15, wherein the parent IFN-α is interferon alfacon-1.

17. The composition of claim 16, wherein the known protease-resistant or protease-resistant, hyperglycosylated polypeptide variant is selected from the group consisting of the [D99N]interferon alfacon-1, [D99N, D105N]interferon alfacon-1, [D99N, D105N, E134N]interferon alfacon-1, [D105N, E 134N]interferon alfacon-1, [E134N]interf 1, and [D99N, E134N]interferon alfacon-1 glycopeptides, and wherein the variant comprises one or more amino acid replacements at any of amino acid positions 41, 58, 78, 107, 117, 125, 133 and 159, such that the variant comprises at least one mutated protease cleavage site in place of a native protease cleavage site found in the parent consensus IFN-α polypeptide.

18. The composition of any of claims 1-11 wherein the known protease-resistant or protease-resistant, hyperglycosylated polypeptide variant is a known protease-resistant or protease-resistant, hyperglycosylated variant of a parent protein therapeutic that is IFN-γ.

19. The composition of claim 18 wherein the known protease-resistant or protease-resistant, hyperglycosylated polypeptide variant is selected from the group consisting of the [S99T]IFN-γ, [E38N]IFN-γ, [E38N, S40T]IFN-γ, [E38N, S99T]IFN-γ, and [E38N, S40T, S99T]IFN-γ glycopeptides, and wherein the variant comprises one or more amino acid replacements shown in Table 3, such that the variant comprises at least one mutated protease cleavage site in place of a native protease cleavage site found in the parent IFN-γ polypeptide.

20. The composition of claim 18, wherein the known protease-resistant or protease-resistant, hyperglycosylated polypeptide variant is a protease-resistant variant of glycosylated native (wild-type) human IFN-γ.

21. The composition of any of claim 120 wherein the known protease-resistant or protease-resistant, hyperglycosylated polypeptide variant comprises a carbohydrate moiety covalently attached at each glycosylation site in the polypeptide variant.

22. The composition of any of claims 1-21, wherein the known protease-resistant or protease-resistant, hyperglycosylated polypeptide variant comprises any carrier peptide selected from the group consisting of the carrier peptides of Table 9.

23. The composition of claim 22, wherein the carrier peptide is part of the covalent molecular structure of the known protease-resistant or protease-resistant, hyperglycosylated polypeptide variant.

24. The composition of claim 23, wherein the carrier peptide is at or near the N-terminus of the known protease-resistant or protease-resistant, hyperglycosylated polypeptide variant.

25. A method of treating a disease in a patient, the method comprising:
administering orally to the patient an oral pharmaceutical composition comprising a first number of moles of a known protease-resistant or protease-resistant, hyperglycosylated polypeptide variant of a parent protein therapeutic, in an amount whereby the patient receives the first number of moles of the known protease-resistant or protease-resistant, hyperglycosylated polypeptide variant at a first dosing interval, the known protease-resistant or protease-resistant, hyperglycosylated polypeptide variant comprising at least one mutated protease cleavage site in place of a native protease cleavage site found in the parent protein therapeutic, and further comprising: i) a carbohydrate moiety covalently attached to at least one non-native glycosylation site that is not present in the parent protein therapeutic; or ii) a carbohydrate moiety covalently attached to at least one native glycosylation site that is present but is not glycosylated in the parent protein therapeutic;
wherein the first number of moles of the known protease-resistant or protease-resistant, hyperglycosylated polypeptide variant is greater than a second number of moles of the parent protein therapeutic in a parenteral pharmaceutical composition, wherein the parenteral pharmaceutical composition is an immediate release formulation suitable for subcutaneous bolus injection;
wherein the parent protein therapeutic is proven to be effective in the treatment of the disease in a patient when administered to the patient by subcutaneous bolus injection of an amount of the parenteral pharmaceutical composition whereby the patient receives the second number of moles of the parent protein therapeutic at a second dosing interval; and
wherein the first dosing interval is the same as or shorter than the second dosing interval.

26. A method of treating a disease in a patient, the method comprising:
administering orally to the patient an oral pharmaceutical composition comprising a known protease-resistant or protease-resistant, hyperglycosylated polypeptide variant of a parent protein therapeutic, in an amount whereby the patient receives a first dose of the known protease-resistant or protease-resistant, hyperglycosylated polypeptide variant at a first dosing interval, the known protease-resistant or protease-resistant, hyperglycosylated polypeptide variant comprising at least one mutated protease cleavage site in place of a native protease cleavage site found in the parent protein therapeutic, and further comprising: i) a carbohydrate moiety covalently attached to at least one non-native glycosylation site that is not present in the parent protein therapeutic; or ii) a carbohydrate moiety covalently attached to at least one native glycosylation site that is present but is not glycosylated in the parent protein therapeutic;
wherein a parenteral pharmaceutical composition comprising the parent protein therapeutic is proven to be effective in the treatment of the disease in a patient when administered to the patient by subcutaneous bolus injection of an amount of the parenteral pharmaceutical composition whereby the patient receives a second dose of the parent protein therapeutic at a second dosing interval,
wherein the first dose in moles of the known protease-resistant or protease-resistant, hyperglycosylated polypeptide variant per kilogram of patient body weight is greater than the second dose in moles of the parent protein therapeutic per kilogram of patient body weight when the first and second doses are calculated for the same patient body weight, and
wherein, upon oral administration of the first dose to the patient, the time required for release of all of the known protease-resistant or protease-resistant, hyperglycosylated polypeptide variant in the first dose is no greater than the time between doses in the second dosing interval.

27. The method of claim 26, wherein the time period between doses in the first dosing interval is the same as or shorter than the time period between doses in the second dosing interval.

28. A method of treating a disease in a patient, the method comprising:
administering orally to the patient an oral pharmaceutical composition comprising a known protease-resistant or protease-resistant, hyperglycosylated polypeptide variant of a parent protein therapeutic, in an amount whereby the patient receives a first dose of the known protease-resistant or protease-resistant, hyperglycosylated polypeptide variant at a first dosing interval, the known protease-resistant or protease-resistant, hyperglycosylated polypeptide variant comprising at least one mutated protease cleavage site in place of a native protease cleavage site found in the parent protein, and further comprising: i) a carbohydrate moiety covalently attached to at least one non-native glycosylation site that is not present in the parent protein therapeutic; or ii) a carbohydrate moiety covalently attached to at least one native glycosylation site present in but not glycosylated in the parent protein therapeutic;
wherein a parenteral pharmaceutical composition comprising the parent protein therapeutic is proven to be effective in the treatment of the disease in a patient when administered to the patient by subcutaneous bolus injection in an amount whereby the patient receives a second dose of the parent protein therapeutic at a second dosing interval, wherein the first dose in moles of the known protease-resistant or protease-resistant, hyperglycosylated polypeptide variant per kilogram of patient body weight is greater than the second dose in moles of the parent protein therapeutic per kilogram of patient body weight when the first and second doses are calculated for the same patient body weight, and
wherein the time period between doses in the first dosing interval is the same as or shorter than the time period between doses in the second dosing interval.

29. The method of any of claims 26-28, wherein the second dose is a fixed dose.

30. The method of any of claims 26-28, wherein the second dose is a weight-based dose.

31. The method of any of claims 26-28, wherein the second dose is a stratified dose.

32. The method of any of claims 26-31, wherein the first dose is a weight-based dose.

33. The composition of any of claims 26-31, wherein the first dose is a fixed dose.

34. The method of any of claims 25-33, wherein the disease is that described in a claim selected from claims 1-22, and wherein the oral pharmaceutical composition is that described in the selected claim.

35. A method of treating a disease in a patient, wherein the disease is that described in a claim selected from claims 1-24, the method comprising administering orally to the patient an effective amount of the oral pharmaceutical composition described in the selected claim.

36. The method of any of claims 25-33, wherein the known protease-resistant or protease-resistant, hyperglycosylated polypeptide variant comprises any carrier peptide selected from the group consisting of the carrier peptides of Table 9.

37. The method of claim 36, wherein the carrier peptide is part of the covalent molecular structure of the known protease-resistant or protease-resistant, hyperglycosylated polypeptide variant.

38. The method of claim 37, wherein the carrier peptide is at or near the N-terminus of the known protease-resistant or protease-resistant, hyperglycosylated polypeptide variant.

39. A synthetic Type I interferon receptor polypeptide agonist.

40. The Type I interferon receptor polypeptide agonist of claim 39, wherein the polypeptide agonist comprises at least one non-native glycosylation site.

41. The polypeptide agonist of claim 40 wherein the non-native glycosylation site is an N-linked glycosylation site.

42. The polypeptide agonist of claim 40 wherein the non-native glycosylation site is an O-linked glycosylation site.

43. The Type I interferon receptor polypeptide agonist of claim 39, wherein the polypeptide agonist comprises at least one mutated protease cleavage site in place of a native protease cleavage site.

44. The polypeptide agonist of claim 39 or 40 or 43 that is a hybrid Type I interferon receptor polypeptide agonist.

45. The polypeptide of claim 44 that is selected from interferon-α2a (D99N), interferon-α2a (D105N), and interferon-α2a (D99N, D105N).

46. The polypeptide of claim 44 that is selected from interferon-α2b (D99N), interferon-α2b (D105N), and interferon-α2b (D99N, D105N).

47. The polypeptide of claim 44 that is selected from interferon alphacon-1 (D99N), interferon alphacon-1 (D95N, D105N), interferon alphacon-1 (D99N, D105N, E134N), interferon alphacon-1 (D105N, E134N), interferon alphacon-1 (E134N), and interferon alphacon-1 (D99N, E134N).

48. The polypeptide agonist of claim 44, wherein the amino acid sequence of the polypeptide comprises discrete sub-sequences corresponding in amino acid identity and number to sub-sequences of different, naturally occurring Type I interferon receptor polypeptide agonists selected from interferon-α2b, interferon-α14, interferon-β1, and interferon-ω, where the amino acid sequence of the polypeptide agonist differs from the amino acid sequence of naturally occurring Type I interferon receptor polypeptide agonists interferon-α2b, interferon-α14, interferon-β1, and interferon-ω.

49. The polypeptide agonist of claim 39 or 40 or 43 that is a consensus Type I interferon receptor polypeptide agonist.

50. The polypeptide agonist of claim 49 wherein the polypeptide agonist comprises an amino acid sequence as set forth in SEQ ID Nos:9-19.

51. The polypeptide agonist of any of claims 39-50, wherein the polypeptide agonist is glycosylated.

52. The polypeptide agonist of any of claims 39-44 or 48-50, wherein the polypeptide agonist is glycosylated at a non-native glycosylation site in the polypeptide agonist.

53. A polynucleotide comprising a nucleotide sequence encoding a synthetic Type I interferon receptor polypeptide agonist of any one of claims 39-50.

54. The polynucleotide of claim 53, wherein said synthetic type I interferon receptor polypeptide agonist comprises the amino acid sequence set forth in any one of SEQ ID Nos:9-19.

55. The polynucleotide of claim 53, wherein the polynucleotide comprises codons corresponding to human codon usage bias.

56. An expression vector comprising the polynucleotide of claim 53 operably linked to a promoter functional in a eukaryotic cell.

57. A host cell comprising the polynucleotide of claim 53.

58. A host cell comprising the expression vector of claim 56.

59. The host cell of claim 57 or 58, wherein the host cell is a eukaryotic cell.
